United States Patent Application Publication US 2025/0268953 A1 - sequence listing, part 3

SEQ ID NO: 9 - DNA, 3734239 bp, Alistipes finegoldii (residues 1,867,121-3,734,239 of 3,734,239)
  source 1..3734239: mol_type = genomic DNA
cgatacgatccgcaaacccgtgactgcggaactggaggcgttcgacgaattcgtcgatcgtcagtttacggccgagggggaactgctctccgacatgctgcgttacgccctgtcgtcgcgcggcaaaggcatccggccgctgctggtgctgttgtcggccgcgatgaattcgccggtggcggaggcggccaaggggcgccgggtccatctggcagccatgctcgtggagatgattcacgtggcgtcgctgattcacgacgacgtgatcgacgaagccgacatgcgccgcggcaagccgtcggccaatgcgcgctggcagtcgcacaaggcggtgattctgggcgactacattctggcccgcaacctgagcatcggcctgacgagcggtcagttcgatctggtgacgcacgtctgcgggtcgatggcggcgctctgcgagggcgaggtgctgcaaagcgagtgcgccgaaaaacataccatgacgcggcaggcgtacctcgacatcatctataagaagacggcgtgcctgatcggcgtcagcgcttcggcgggggcgatggcggtgggcgcttcgcagcagaaggtggccctgatgcgccgcttcggcgaggccgtgggcatggctttccagatacaggacgacattctcgactacacgcgcacggcgcatacgggaaaacctgccaacaacgacctgcgcgagggcaagatcaccctgccgctgctggccgtgctggacaaggcgccggccgaacgctgcaccgaactgctggagcggctggcctgctgtcacgacgacgaggagtcggtggaatacctgcagcgtacggtcgagaacgaaggcggactgaccttcgccgccgaggtgatgcgcagctatatcgcgcgggccgtggagatgctctcggaatacgaggcgtcggattaccgtacggcgctggcgaacctctgcgcctacatcgccgaacgggaccggtaaaccggaaaactcattaacctaaatttcataaaactcaatggagacgaaaaaacaaaattacactttgccgatcattgtgatgatcttcctcttcggtatgatctcattcgtgacgaatctggcatcacctatgcgtgacattctgaagtaccagttcaatgtgcccaactggatgggaacgctgggcgtgttcgcgaacttcatcgcttatgcgatcatggggtatcctgccggcaacatgctgcagaagtacggctacaagaaaaccgcactgatcgctatcgccgtcggctttaccggcgtcggcatccagacgctctccggctcggtcgagagcttcggcgtctatctgctcggcgccttcatcgcaggtttctccatgtgtttgctcaacaccgtcgtgaacccgatgctcaacaagctcggcggaggcggaaacaaaggcaatcagctcattcaggcgggcggctcgttcaactcgctctgcggcacggcggtcatcatcctgaccggcctgctgattccggagggaatcaagaatgcgcagatcagcaacgtattcccgctgatgtacggcgcattggccattttcgcattcgcattcatcgtgatcgcgctgacgaagattccggagacccagaagacggagggcaagaaagtcgccgagacgtcgaaatacagcccgctctcgttccgtcacttcattctcggttccgtggcgattttcgtctatgtgggtgtcgaagtcggcgttcccaacgtgctgcagaagtggctgcagaatcctgagctgaatgtgctgggcagcggcgtgaacgtcgaggctatcgcaggttcggtcgccgctacgtattggctgctgatgctggtcggccggcttctgggcgcgatgatcggcagcaaggtgtcggcgaaaagcatgctgatggtcgtatcttcggccggcctgctgctgacgctgggcgccatgttcgcgccgaacgtgccggtcaacctgccggttttcaacggcgcggagggcttcggactggtcaacgtgccggtgagtgccgcgctgctggtgcttgtcggtctctgtacttcggtcatgtggggaggcatcttcaacttggcggtagaaggattgggtaaatatacggaaaaggcttccggtattttcatggcgctggtctgcggcggcggcatccttcccctgctgcaaaacggcatcgtcgatttgacgggcggcgtaggttacctgacgagctattgggtgatcgtagccggtttggcctatatgctctactatgcgcttatcggttcgaagaacgtcaacaaggatattccggtggactgatgctccggtcggaaaacgaaaaatcccggtgccgagtttgcggcgccgggatttttttgctgtagccggggaggggcggcggttgtttgcaggcgacgggggcttgcagagggagggaatgcttaatccggccggcggaatggcgcgccgggatgggccggagcagggagcggagaaggggccgcacaggagcaggaatgcggatgcggagagccgccgcagacggcgagatgcaggcggcggggagatgcaggcggcggggagatgcaggcggcggggagatgcaggtggcggggagatgcaggtggcggggagatgcaggtggcggggaggtcgggcaggaaactgaatggcggggcggaataagaagcggaggacggggcgggctgaaggggacgggcggcggcttcggatggaagagacggcggataagagaaaaggcagcccgaactgaaagacggcggctataaataagaaataagtgatgcgctcgtgggcgtcggactgcgggcctgagagggacggactgcgggacggaatggaaagaacagccggttgaagagaaaggacgaagcgaaggggcggaatgaaaacggaacggggcgtcgcgggcaataaaaaaaacagggaagccggagcttccctgtttttcttgctgaccgtccggattatttcttgtccgcgctggtcatgcgcttctccttgatgcgggccttcttgccggtcagatcgcgcaggtagtagatacgtgcgcggcgtactacgccgaccttgttgacctcgatcttgtcgatgtggggcgagtagagggggaagatacgctccacgcccacgccgcccgaaatcttacggatcgtgaacatcttggtcttgcccgaacccttgatctggataactacgccgcggaaactctgcacgcgctccttgctaccctcgacgattttgtaggatacggtgatcgtgtcaccggccttgaacgacggaacatcggcatccgtctttgcccacatctgctcgtttacgagcttgatgattgcgtctttgttcattgttgcaacaattattgtgtttcgcacccaacattcccgctgtgcccggcttaccatacggataccctgatccgtaatcctgcgtccgcggcttcggaccgcctgagccgtccccgccctcctgcgcaactgcgcggcacccaatgaaagaggttgatatacgccctgaaagggagtgcaaatatacgaagtttttttcattcggcgcaaacggggcgtaaaaatatcgtttcggggcgcgatttatcgttgtctttacggaaaacgggggcggttcgggcggaacgggagacggctttggtgaagcggagggcggcatggctacaacagggacggcatggctacaacagggacggcatggacacaacagggacggcttcgacaagaggggaggcggttttggtgaacaaggggcggtacggacaaaacgggaggtgcagtgcggataaaacaggacggcatggatacaacgggacgacgcggacaacaaggtgcggttcggacgaaacaaagtgcgccacggacaaaatcggaaacaaattttcgttttgtcgcccgcctttcactatctttgcggggagacagacgccgggccggcaggtcgaatccggcaaaattttgtgcggatacgcatttgagaacggtttatgctgtctttgcgataaacttgagatatgaaggaagagagactgatacttgtcaccaacgacgacggctacgattcgaaaggacttgcggcggccgtggaggtcgcgcgcggcttcggccgcgtggtcgtggtggcgcccgaaacgacgcagagcggcatgagccaagccatcacgatgtacaacccgctgtacctgcgctgtgtgcggaaggaagaggggctggaggtgtacgccttttccggcacgccggtggactgcgtgaagatggcattcgattacctgctgcgcgaagagcgcgtcgatctggtaatttcgggcatcaaccacggctccaactccgccgtgaacgtgctttattcggggacgatgggcgcggcgatcgaaggcagcttctacggctgtcccgccgtcgggctgtcgctcgacgaccacggcgaggacgccgatttcgaggcggcggtggcgtacggcaggcggatcgtgggcagcgtgctcgaaaacaggatcgagctgccgctctgtctgaacgtgaacgttccggtcggcaggcccgacgagctgcgcggcatccgtctttgccgccagaaccgcggcttctggcgcgaggagttctaccgccacgaggatccccgcggccgggagtatttctggcttacgggagccttcgtcaacgaagagccggaggcgcaggacaccgacgaatgggccttgtcgcacggttacgtctcggtggtgcccgtgcaggtggacctgacggattaccgtcagctcggagcgcttgccgaagtgctgaaataatcgtatatttgcagtaaagtaaatagtcaggcctatgctgatcaaaatcctgctcgtcatttcgatcatcgtccagaccctcgccacggcttacgccctgcggctggtacgcgccaccaagtacaactcggtgtggattctctttatcgtgggcttttcgctgctctccgtcgagcggttcgtgcagctgctgatggccggcgggcactacgtgccgcgctggtggttcggctatctggggatcgtggtctcggtatgtctgtcgatcggcgtcatgtatgcccacaagctgttcaaatacatcgaccgtctgaaccggcagcggcagctgctcaacaaacgcatcctcacggccgtgctccgcaccgaggagaaggcccggtcgcgcttctcgaaggagctgcacgacggactcggcccgctgctgtcgtcggcccggatgtcgctctcggcgctttcgcgcgaggagcgctctgcggaccagcgcgagatcatcgacaatacgacctatgtgatcgacgaggcgatccgttcgctgcgcgagatctcgaacaacctctcgccgcatgtgctcaacgatttcggactggcgcgcggcgtgcagaacttcatcgacaagagcgcggcgatgcacgacgcgaagatacgcttcacgacgaacctccgcacggagcgttacgatacggatatagaggtgatcctctaccgcgtgatctgcgagctgataaacaactcgctcaagcacgccgcctgcacgtcgatcaacctgtcgctgtcgcagaacggctcggagctggctctcgactacacggatgacgggcgcgggttcaatccgcaggcgatgatggactgcggcatggggctttcgaacatctcgtcgcgcatcaattcgctgggcgggaccttcgacatttcgagcgccaagggcaaaggcatgcgcgccgcgatccgggtcaatacgcagcaggaaccggcgctcccgaagcgcaaacgccgtaaccggtagaatcatggaacgcaaaatagtactcgtagacgatcattcgctcttccgcaacggactgcgggggctgctcgaacgctgcgccgggtgccgcgtcgtgggcgaagccgccagcggcgaggagtttctcgcgatgctgcccggactggagaccgacgtggtcttcatggatttcgccatgccgggactcgatggggcgcagaccaccgaacgggcgctggcccggcggcccgatctgcggatcatcaccctctcgatgttcggcgaggagagctattattcgcgcatggtgcaggccggggcgcggggatttctgctgaaggattccgacatcggcgacgtgatcgaggccatcgacgcggtgatgtcgggcggaagctatttcagcccccagctgctttcatcgctcacggggcggatgcgcacgcgcgacgacgtgcccgacgagcagctctcggtccgcgaacgcgagattctggtggccgtgtgccgcggactgtccaatcaggagatcgccgacgaactgtttatttcgaagcgcacggtggacaagcaccgggccaacattctcgaaaagaccggctgcaagaacaccgccagtctggtcgtttacgccatccgcaacggaatcgtcgaaatctgacctcctgaaatcctgatgtcgggaaaaatcgtccggccgcatgcgtctgtattcgcgtgcggcgtattcgtgtgcgctgttggctgcggcgtttacagcagcggcgagaagacccgcatgagcgattcggcgacgcggcggctccgggggcggcggaaccattcggccggggtgagcggatggctgcgcgactggtcctcttcgaagacggaggccatgcgcgccgtgaattccccgtcgtagacgaaggcgttgacttcgaagttgtgttcgaaactgcggaagtccatgttcgcggagccgatgaccgagagcatgtcgtcgatgatgagcagtttggagtgcaggaatcccggcatgtagaagagtatctttacgccggccttcatcatgtcgtcgaggtaggagtgcgtcgccagatccacgaccttcgaatcggagcgtgcggggagcatcagccgcacgtcgatgcccgccagcgcggcctcctgcagcgccgagttgaggacgtcggacggaaggtagtagggggtttggatccacacccgccgccgggcgcgggcgatggcgtagctgtcggcctgcagcagcgtccgccatttgccgaaggggccgctggagacgatctgcatgatgttgtcggtgaaacgcgccgcggggggatagtattccgccgcggcgatctgctgcttggtggtcgccgaccagtcgctcaggaacgacgcctgaaggcccgcggcgccgctgccctcgatccggaaatgggtgtcgcgccatgtgccccatcgggtgccgcggacgtagcggtcggcgatgttcatgccgccgaggaagcccacgcagccgtcgatgacggcgatcttgcggtggttgcggtagttgaccttgctggtgaagagcgggaatttgacgtgcaggaaggcgtagacctcgatgccttcgctgcgcatgctgcggaaaaaggattttttggccccgctgctgcccacgtcgtcgtagaggatgcgtacctcgaccccttcgcgggcctttgcgatcagcgcgtcgcgcaggcggcggcccgtttcgtcgtcgttgaggatgtagtactggatgtggatgtggtgctttgcgcaggcgatttcggtcagcagggcctccatcttcgaccgcccgtcggtgtaggtggtgatccggctgccgtagagcgggatcgagtggctcgtgttggtcagcagggcggccagcggacggtacgcttcgggcaggtcgggaccgtcggtgtgctcggcttcttcgagctgcagggtgatgcgcttgcgcgtccggcgcgagatgatgcgctgtttggagaggttctggccgaagaaaaaatagaagatcagccccaagacgggggccagcaccagcacgatgatccacggcagcgtcttcagcggattgcggttgtcggtgatgacgaccagaatgatgccgaggatggtgaccgaatagataatcagaaaaatgtatgtcagaatttgctgcatacgggtttcttcatcggtgcggaggaccgccgggcggggttactgccggggctgctccggaaatttcagcaggtagagcaggtgctccacgccgcgcacgtagttgcgcttgtggtttttgggcgagtagacgtagcagtcgatggtcaggacgcggccggtggccgtatcgacggtcgtgtagctgacgaacgggccgcccatgaagtcgccgtggacatcccagaaaccgcgcagctcgcaccacaggcgtccctccatgcggaacatgcggtagtcgggttcgaacgcttcggaggtggtcatgtacgaaccgtcggacggacccggaatgcgggcggcgaattcgttgcgcgccgcgagcagggcgcccggcgagagcgactccttgccccggtaggggtaggaatagatgaagaagccctgactggccgtggggtattcgtagcgcgcccagaggaaatccttctcgtcggcggccagcacatagcctttcggtacggtcatgtcgaccccgaacgtgctctttatcgccttggcgacgcgctgttcggagaaggcttcggcgaatttgaccgcccggtcgcgctcggccttttcgagcacctgcaccagactttcgcggtgctcggagaggtagtcggtgagcgccttgtcgtcgggaccctgcagggtcagcacgatctgcggttcggccgtcacgtcgtactggacggcgatgttggtcgcggcgagcgaagggtcttcgacgatcttgaggatgttgcggtggtcggcgaccatgcccgtgaatccccgttcggtgacgcggagcacgtcgaacagcggctcggtctggttgaggtagggaaccggagccgtgagtatcgagcgcagcgtgtcgcccagctcgcccgtccactcctgctgggggcagacgacgatcagctcgtagggggagccttgagcggttttgagccgcgattttgtcagcgaatggaatgcgtcgcaggccgtcatcgctgcgaaaagggccgcggctgcggcaatgcggaaaaacgttttcatagccggtcgtaagttgattctacacacaaatatagctaatttttcggaaaagcgcggattttcactatttttgcaggatgataaattccccgcccggaccggcacggacgaaacggttcgccgctgtcgcggtctgcgcgggcttggtccggaataggaaaccatgcgtttaaaaccaccgaaaataatccgccggctgatgccggacctgatctgggagatcgacgacccggagggcgtgttcctcacgttcgacgacggaccgactcccggcattaccgagtggattctcgccacactggacaagtacgatgccaaagcgacgtttttcgtgttgggaaaaaacgtcgagatgtatcccgacctgttcaggcgcatcgtcgatgcgggacacaaggtgggcaaccacacctattcgcaccagaaggggtggggcatgagtctcgaacgctatacggaggatgtggattttgccaacgacctgattcatagcgaactgttccggccgccctatgcgcggatcacgccggcgcaggcgcggtttctggggcagcgttacaagctggtgatgtgggacatcatttcgcgcgactacaaccgcaacctctcgccccggacctgcctgaggaacgtgacgaagtatctggcgccgggggctatcgtggtgtttcatgacagcgagaaagccttccgcaacatgcgctacgccctgccccgcacgctggagaaaatcagacagatggggctgaaatgcaaagccatcgaattctgacatgaagatcgtcgtcgccataaccgccgccagcggcggtatttacgcccggctgacactcgaacggctgctgcgctcgtccgaagtgtcgcagatcgcgctcgtatgcagcgcccatgcccgcgaagtgctggcgcacgaggatgtcgtgctgccggaggatgggcgtatccggctcttcggcaacgacgatctgtttgcgccgccggcgagcggctcggcccgctacgacgcgatggtcgtcgtgccctcgacggtcggcaccgtggggcgtgtggcggccggtgcggcgcagagcctgatcgagcgggccgccgacgtgatgctcaaggagcgtcggcggctggtgttcgtggtgcgcgagacgcccctgtcgctgatccacctgcgcaacatgacggcgctgaccgaagccggggccgtgattctgcccgcatgcccttcgttttacgccggggcgcaggacgtcgagaccctctgcggtacggtcgccgaccgcgccgtggcgctgctcggcgtcgatgcggagcactatgaatggggcgaataggaatttacggatttttttcgtaactttgcgacctcgaaaaacatctaaacagaatacctttatggcaactacagctgacatcaagatcggtatgtgcatcgaactggatggcaagaccttccagatcgtggatttccagcacgtgaagccggggaaaggccctgctttcgtgcgcaccaaactcaagaacctcgaatcgggccgcgtactcgacaacaccttctccgcaggatcgaagatcgaacccgtacgcgtcgaacgccgtccctatcagttcacctacgaggatgatctgggcgcccacttcatgcacacggagaccttcgaggagatcaatatcgacaaggacctgatcaccaactacgacctgatggccgacggccagatcgtcgaggtgatgttccacaccgagaaggagaccgtgctttcggccgagcttcccccgatcgtggacatggaggtgacctacaccgagccgggcatcaagggcgataccgcatcgaccaactcgctcaaacccgccacggtcaataccggcgcaacggtccgcgtgccgctgttcatcaacacgggcgacaagatccgcgtagacacccgcacgcgcgaatattacgagcgtatcaagtaaatcgccgggcgaatgccggttccgggccgaacgtccggatcggaaataaacgggggctgcttttgaaagcagcccccgtttatcggtttgtgcggcggtcagtcgccgaccttatacatgacgtagaagagttccgtcgaactgcgccacatgttgtcgtagaacgagtcgcgtcccggttctccggcggcgctgggcagcaggaagcggaaaagccggttgttgccttccgtgccgaagatcatggtcgaggagacgttgttctgcgtgatcttcatctggttggtggtcaggtcgagggtccactgcgattcgcccggcggaagcaggtgacgcagacgcgggttcatgtccagcggggcttcgacgctgtaaggcgcgtagacaccccagaaattgccgtacgccccgtcgtcgccggccgaatggacgagcgttccggtgagttcgttgtcggagatctcgccgagcgtgatcgtcacccggtcgtcgtattcgggaagtccgtaggtgccgaattcgccgctgctgagctgcgtcgtccaagctccgtcgccgacgccgctgacccgctggttgcacgccagcttgacatcgacgatgcgccatgtgccgaggaagaacggatcgtaggtttcgaggtagatccaccagtcgagcctgtgtcccgaccgggaggtcacggtgatgcgcgcccggcgttcggggttgctgaaattgagcacgtcgccgttcccgacgctggcgctggcgccctccgagacgacgattcccttgacgggaacccggtcgtaggcgaagccgggagtttcgaggatatagaccgttgcggtggcccggctgccgtcgcggtcgatgatggcggttcccatctgtccttcgacacgcagttcgagcagcgaacgttcgttgccggaaaggtcctcgtcgatggtcttcgtacacgatgacagggccgtgacaagcagaagggcggtcggtatgaggtattttttcatcttcgtagtgtctatttaacgttcggattcaaatcgagttcgcgctgcgggatcgggtagaaggccgcctgctcttcggagagtttcgtggcttcgggaaccgtagcggtgaccgacgccgtgcggcgcaggtcgtagaggcggttgccttcgaacgccagttcgagggcgcgctcctgaatgacggctttgcggaattcggcgagactcatgccctccggcagctccgggattccggcgcgccggcggatttcgttgaccagcgccagtccttcgtcgggaccggccgcttcggcgaagacgagcgcgatgtccgaatagcggatcaggaagggacgggcgctggtgcgttcgccgatgaagtcgggatcgacgtatttggccgagaagtagccgcgaacgggagagggggtgacgagtttgccggtctggtcgtagatgtccttgtggatcagctctgtgcgccgcttgtcggtggcgaggaaggtcttctccacgaagttgtcctcgatcaggaagacgccccagccgttgccgttgcccttctggaggctgccgtcgctgtagcggatgtaaatcggcgcggagccgttgttgggcaggaactggagcgggattttcgaatacatgccttcgtgcgtgccgctgcggtcgatgcccatgatgaagatgtgttccggtccgtcgggtttcgtaacgtcgtagatgctgcgcaggtcgctgtcgaagttgtacgtctccttatagtcgaaaaccaccttgcgcgaccagtaggcggcctgcgtatacatttcgtcggcgttgcgcggcgccgaggcgtagccgggagccttgcaggcgatgctcgacgcgagcgtcaggtagactttcgagagcagggcctgcgcgccgaccttgtcgatgcggccgaagaccttgtttaccgtgagcatcttttcggccgcgagcaggtcctccagaatccggtcgtagatcttgtcgatcgactcggccatctggggcgtcgtctcttcgagcgacgagatcggctcggtgtagagcggaacccggccgtaggcccggacgaggttgaaatagttccatgccctcagaaacagggcctcgccgaccacgcggtttttcaccgtttcgttcagattgcctcccgaaacgcgttcgatgaccgtgttggcgcggttgatgccgatgtagcagtatttgaagtagtacatcgtcagctcggtttccgaattgacggtccattgctgcagcatgtggatgtcgcccggctcgtccgatttgggatacatcgtttcggtcgggatgtcgcccagataccagattccgcggaggtattcgaggtagttcaacgcattgtaggcgtacatcaggcccgattcggcatcctcctccgtcttgtagaagttgtcgctcgaatagaagccgtagggggtctcgtccagcgagcaggccgaaagcatgccgaccgcagcgagcgtgaatatgatctttttcatggcttgtcagaattagaagttaaggtcgataccgacggtgtatttgcggagtttgggatatccgccccagtaaatgccgtcgagtcccacttcggggtcgtatccgtcgaatttggtgaaggtgtgtacgttgtctatgttggcgtagatgcgcatgcccttgaggaacctgcggttgaagtggaggttgtagccgagggtgatgttctggatgcgcaggaacgagccgtcctgaaggaagtaatccgacagccagtattgccgggcgttgttcagccgcgggaaatcgttggtcggattgtccggagtccaccgcttggccttgacgcgcgggctgaacgtatagttgttgtacagcacgtcgttgccgtagacgccgtagaggaatacggagaggtcgaggttcttccagcgcagcgagaggttcaggctggccgtgaagtcgggattggggtcaccgatgatgcaccggtcctccggcgtgatggcgtagtcgcccgtcaggtctacgtatttcagcccgtcaggtctacgtatttcagcccgtcaggtctacgtatttcagctcgccggggcggtctttcagtccgtcggggtcgatgaatccggggtcctgcccctcctgaatgatgccgtcgacgcggtaaccgtagaatacgttcatcggatggcctaccgcatagatgctggcgttctggttgaacatggagaccggttcgccggtcacttcgtagtacatgcccgtcaggtaatcctgcgagagaccactcgaaatggcgtcgcccaagcttacgaccaccttgttgcggttcatcgagtagatgaaggtggccgagaaactccagtccctcgtgtggacgatgtcgccttcgaggctcacctcgaagcccttgttcgtcacttccccgtcgttgacccatattttgtcgtagctcgacgacagggacaggtatttttcatgcagcaggtcggtggtctttttgtagtagacgtcggcggtcagccgcaggcgacggtcgaaggctgcgaaatcgacgccgaaatcgagctgcgaggtcgattcccacttcaggtccggattggcgatgccgccccataccatgtaccggttgttggcgccggtgcggcccacctcgtagccgggaccgatcacggtcgcccactcgccgttgtgccagaatttctccatgccgtagcggtcgagggtctggtagctgctgatgccctgattgccggaggctccgtagctcaggcgcagcttcagttcgctcagccagcgcgattgcttgagccacggctcgttgtgcatcttccagctgacggcccccgaagggaagtagccccacttgttgtttttgccgaacttcgtcgagccgtcggcgcgcatggtagccgtcagcaggtatttgtccttgagcgagtagttgatgcgcccgtagaaggagagcagcttgctcaggtagtacccgtcgttgtatatctggcgcaggttgggattgccggcgttcatgttttcgttctggaggacgtcgttgacgaatccgcgggcggtcgtgtagagtccgcggcccgtgtcccagttgtaggagtggccggccatgacggtcagggcgtggttctcgttgaacgtgcggctgaatgtcaggtaggtctccgacatgaggttctggttgaacgaattgttgatctgggcgatgccgccgttgtcgttggcgtcctgcgaagtgttgctggcgcggtacacgtcgccgaccgaggtctggtagcggtagtccagctgcgagtggatcgtcagccccttgaccagctcccagtctacggccagcgaggtgacgaagtcgcggccggtggttttgttcagcacgttatccagaatgaccagcggatggccgaagtcctgcgccccggcaagatagtagttgccctccttgtcgtagacgggccaaagggggttgcggccgtattcgagtccgttgctgatgttgcggttggtgatcgagaagacgttgtaggaggtcagtttcaggttcttgtagaggttgtaggtgacgccgaggttggcgttgatgcgctcgtaggagtctttcttgtacaatccctgattgttgtggtagttgacgttgaggttgatcgaggcgcggtcgttggcgctgctgatggctgccgtcgtgctgttcaggacgggggttctcaggcagaggtcgcgccagtcggtattggcccattcgccgttctgtatctcaagcagcgagggataatagatgccgccgatggtctggccgatgtagatggggttgagtccggcgtttacctgctcctcgttggtgacctgagccatgagcatcgggtcgtaccagatgtcgagcgggtcggagagctggctgatgaccgtctggtgcttgaccgaaatgttggtctgcccctttgcggccgacttggtcgtgacgaggatcacgccgttggcgccccgtgatccgtagattgccgatgccgaggcgtccttgagaatctcgatcgattggatgtccgagacgttgatctgcgagaggttgcccgcatcgcccatcgggaagccgttgactacgacgagcggcgtgttggagccttcgagcgagctgttgccgcggatgcggacgatcgctcccgcacccggatcctgcgaagtgttcagcacctgaagacctgcggcacggccctgaagcagtccgtcgaccgaagtggaggagaggttgtcgagcgcccccattttgacggacgccaccgaaccggtgaggtcgcttttctttacggcgccgtagccgaccacgaccacctcgtccacgagtttcgaatcgtcttcgagcgtgatcgggtagaaggtcgccgtggtgacctccttttccgccgttttgtagccgagcatcgtgatttgcagggtcgcaccctttgcggcgccgagttcgaacgttccgtcggctttggcggaggtgccgttggtcgtccctttgacgatgacgctggcccccgcgacgggctgaccggccggatcggtgattttaccccggatgttctggggctgggcccagaccgttccggcggccaagagaagaacggctcccagcaggaaccggcccaagttggttcgtaagtttggtttcatagggttgttattttgttggttgtcagtagctcatgtattccgagggcagcgggtctggctgcatctccccggccagatagtcgtccagacagatgaaggtgccagcggtccagcccagcatcgcgggcatctcgtattcgttgctgacatcggtcgttcccgtttccgcgttgtacttttcccagaggttgcccgtcgtcttgaacgattcggtgaccgctttcatccatttgacggcaatgcgttcggcctctttgccgtatccgtagcgggccagtcccatcaccgcatagaagcagaccgggggccacgtgttgggataggaccactggtaggggtagtcgtagggcttgtcctcgcaggcggcgatgccgtaggggaatgagcgcctgtacgatgtcgccggcgtattcacggggtacggcgccggagtagaggagcgcgaagaccgctcccgaaagcacgtcggagcgccggccgttgacgtagtcgtagtcgtagaactgtttcgcttcggggtcgtagcagtattggagtatccgtgcccggcgaagctccgctttggcgatccattcccggatctcgtccgtacgacccagctcctgcgcgaagcgggcgaagttcacctcgtacatgaagaggttggcattgaggtccagcgggcagaaatccgtacaccggcggtcgtagcgcgggttgaagtcccagcccgattcggcttcggcgacgaagtcgagccccagcttgtggagccgttcgggggtgtagcccttgtcgaagaggtccgttccgaggcgtttgccgccggtgaccagaaattcgtcgaccagagcgtccgatgcggagcttccgtagcggttcagtccggtgggcgtcaggcgctcccgcatccagaatccgtactcctccttcagagtctggtatgcgtcggcgagccactgcttgtcgccggtcagccggtagatgcggtcgaccatcatggagaggtagggcgtctgcgaccgcgcttcgtaataggtgcggctgccgttgtagaccttgccgaagcggcggaccatgtagagcaggttgtcggtattgcctttggccagttcgggatggccgtcccggacgagtccctcgttggtgaagaaggtgtcccaatagtacatttcgcggaacatcgccccggccgtgggaaccgtgtaggggtaaggcaggccgatgagcgtggcggtgtcggcggtgcagtgctggacggtcgtgtgccagttgtcgcggatgaactcccgcacggccggcacgtcggggttctgcgggcggcagccgacgaaagcgagacctgcggcggctgacatgacgataagtatttttttcatgggtatctgtttttcggggttaataggtgtcggccagcgacattgatttcaggcgccgtgcaagctccttggcgttcagttccgacgccacgcggacggtgcgcgtttcgcccggcatgaggtcgaagaagttgtcggagaagtgcgccgtttcgccttcgaccgacagatagacgccccgcgcgaagttgtccgaccggacggtgacgtcgtactccccgccggcccggtcgaccttgcagtgcagggtcgctttcgggtaattcatcgttttctgctgtacgaggaagtagttgttgcggtatgtcttccccgcagcggtgaatgtcgcctgaatgacgacctcttccggagcggctccgttcagcagcgtccgggtgtcgatggcggcgactttcgtgctggcgttggccgggacgtcgatctgctgttcgaactccccggtccggccgcccgtcagacgcaccgcccggacgcacaaggtgcctttctccggagtgagcaggtcggaaacggcgtagatgtcgagccgtccgccgtcgaggatcggggagatcagtatgtccgcgaatgcgtagcgggcgaagtagtgctgcgccttccagacgccgtaccagtcgcggctcgaccacgaagctaccggccagcagtcgttgtgctgccagtagagcgatccccagcagtagcccttgtcgcggcggtgcgcctcgatcgccgttttgatggcgtcgccctgcaagatctgggaggcgtagaggaacgactcgaaatcgtgcggttcgtggtattcgttcagcaggtagcttttgatcaggttgttggcgtgttcgccgccccgctggtgggacatcatgacttccgacgtgatgtcttggtcgccgggcagcggcgcgtagcgcttcaccgtttcgaaacacgggaacgactggaacccgtattcgctgaagaaacggctgcgctggcggttgtactcggtgatgggctttttggcgtgccatacctcccagtagtgccggtcgccctcgtggtcgttgctcatcgcgccgtagtccgagaagggcgaggtgggctggtaacccatgtcgggggcgtattcggccaccacttgggccagcatgcggtaatactgctcctcgtactgtttccagatgatgtcggagtatttcgggtctactttgtcgacgtcgtatttccagccgctgagccacgaatcctgattctcgttgttgccgcaccagtagaccacgcaggcgtggttgcgcaggcgtttgacgttgtcaacggcctccagacgcatgttctccagcagcgccccttcggccgggtagaccgcgcaggcgtacatgaaatcctgccagatcaggatgccctcgcggtcgcaaagctcatagaagaagtcgtcttcgtagatgccgccgccccagacgcggagcatgttcatgttgacgtcgaccgcgtcccggatcgtgcgttcgtaggtctcgcgggtgacgcggggcaggaagcagtcgcaggggatgtagttggcgcccttgcagaaaacgggttcgccgttgagcaggaaccgcaggctgcgtccgtaggcgtcgggcttcttctcgacggtgacggagcggagcccgacctgtgcgctgtggccggccagcacacggccgccaagctccacggaggtacggaaagtatagaggtgcggttcgcccatgccgcggcaccaccatagttccggatgctcgatcgtgaacgggacgctgacccggttcatgcccgcgtggagctgcacgctgcgcgaaccgagcacccgtttgccgtcggagacggtgacgacggcgttttcgacgggcgctgccgcttcgatctccacctgcgtctcgacacgggcggcttcggacgagacctccgtctggcggtggaatacgtcttccagacgcagctcgttccagccctgaagttttaccggacgccagatgcccgacgtaaccagccgcggaccccagtcccagccgtaatgatagcccgccttgcgggtgaaagggctgagttttttccgtcgagtcccccgttgtccgcctgatcgttccaagcctcgtaacggtagggcagggattcgtactgcggcagggcctttttgatcggggagtggaaatagacgcgcagcacgttgccgcgctccttgagcaggggtttgacttcggcggcccagcggcggaacatgttgtccgccgtcaggatctgcgtttcgttcaggaagacgtcggcataggtgtccagaccgaggaactccagccggacgtgttcatagccgcgcgtcagcgctccggcgtcgaaggagacttcgtagatccagtcttccttgtcgatccactgcagggagcgttcgttgagccggtagtagggatcttcgatcagcccgttgtccatcaggtcggtgtggactacgccgggtaccgtcgccggatgccattcgtttcggttcgcctgtctgaacttccagccggagtgaagcggcatcgtgtcgttggcggccgatccgatcgtcgccgatcccgctaaaaataatgtcataattgccttcagggtttgtttgtacatgactagttctctttggtgagggtgaggggcatcgtgttcaggttcaggttgatggtgtaggttcccgacgcatacccgaagcgcgacggatagaactgcggggcgcccttggcgtcgcttgtggcctgatcgtcaatgcggatcaccgtgccgaacggcgcgtcgggggtctgtccgtaccaaggccaccagccgtcggacgaagcgaagatcttgaatcccttgtaatcgccgtcgaaattcatggcgacacccgtggcttcccattcgttgtcgcccttcttgggccggtaggtgcggctttcccagccgcccggagtggcttcgccggtcatcgaataggcggtcgagtagtcgatgcttttcgcggtgagcgtcatcttcatcgtgttgaggtttacctcgatgtcgtaaacgccgttctcgtagccgaacgatcccggctggaactgcgcttcaccgcttttatatacggcgatctttccgaacgtctccgccgaaaggtcctgtgcggcgaaacggggatcgtccgtgtcgttgacgttgcgcgagaagtagaatttgaagccgttgttcaggctcatgggctgcacgcgcagctcgacgccggaggcctgatacaggtgggagccttcgcggctttcgggcagttcgaggcccgcgttcagatcccactgccacggggtggccgcacccaccatgatcagcgagggcgggaagttcggataggtcgtcttcggcgttattgcgcagtttttgatctccgacagctgggcgtcgaactcctcgtccgcgtttttcgcatatacggcgaaccgcaccgccgcttcggtgccggcttccagatcgaaagtgttgagaagcagctgattcagctcgccgtgagtgaagtcgtgtgtcagggccgcgcccttgtcgatgacgaccggaccggagaacatgtcgcggtcggtcaggttgacgtagagcgtgtaggcgacctcggtctgctcgtcgtcggtcgcggcggtccattcggcgtgcagggccggttggtcggagtgctccgggtcgaccagcacggcatcggccgagagggtcagcgtgggggctgtcagggttgcgggttccggaaccggtttttcggccgtgtcgtcggaactgcaggcggcggccagaagaagggtggcggccagacccgcggtcagatagtagagttttcttcgcatataggttggtttttgattggattgatcgggtgtatatgccgaaaacaaaattatcgttttgtccgagcctgcaatagaaaggttcgaaaagcaaaaaagtttgatcggatcgtatcaatccgacgctttttttgcgcatgaaaaggccctgaaaagtgggttatacgaattttaaatattattaaaaacgatgaaacggaatatgtatgggttgattcgctggtattatgtgatctttttgttgtattattcgattgaagtgtgtcatggctcttggaaaatacttttcgacgatgtaattttacctaaaaccacacggattaacatgcaatgtattgttaatcatgtatataacctgataataaccggcctatgaaaaaactcttcctttttctctgtcttctgttcctgctgccgaccgccgctttgtgcagggataaaacctatacgattcaatcacccgattgttcgttgaccgtcacgatcggatgcggtgatcgaatcgtatattccgtccgatcggatacgaatcagattctgaagccttcgcccttggctctcaggctcgtttccggcgaatgctggggccggcggagccgggtggccggagtgcggcgctaccggatcgacgaggtgtacgacgcacctgtttataaaaagcggaaggtggaggatcgctgcaacgggatcgtgatcgatttccgggagggattttcgctggagttccgggcctatgacgacgcggtggcttaccgcttcgtcgcgcgtcagcccggcgaggtgctcgttgcgggcgaagaggcccggttccggttcgctccgggagccgtcgcattcgtgccctatgtgcgcgacaccccttgcaggcacgacggactggctttcggcgagcagttcatgcagtcgttcgagaacacctatacccgtacgccgctttgcgaaatggactccgcccgcttggcgttcctgccgctgctcgtgcagacggccgggggtgtgaacgtctgcatcacggacgccgacctcgaatcctatccgggcatgttcctgcaccgaagcggcgcggacgaactcgaaggcgttttcgcgccctctccgcggaaggtcgtgccgggcggttacgaccgcatgcagggcgtggtcgaggagtacgagccgttcatagcctcccttgcgccgggagaccggctgccgtggcgggcgctcagtatcgtgcggcaggatgcccggctcgcggacaacgatctggtctggaagctcgcttcgccctgccggctcgacgatatttcgtggatcgaacccggcaaggccgcgtgggagtggtggaacgactgggggctttccggcgtggacttcacggcggggatcaaccagcccacctatgaatattacatcgatttcgcatcccgcaacggtctgcgctacctcgttctggacgacggctggagccgcgatcaccattcgccgctggagacggcccccggactcgatctgccggcgctggtgaagtacggcgaagagcggggcgtgggactgatcctctggctcggctacctcccgttcgccgaacagatggaggagctttgcgagcactattccgaaatgggcatcaagggattcaaggtcgatttcatggacagggacgaccagcagatggtccggttcgtctacgatgccgcccgtacggccgcacggtacaggctgctgctcgacctgcacggcatattcaagcctgcgggaatccagcggacctatcccaacgtcatcaatttcgaaggcgtgcacgggctggagcaggtcaaatggtcgcccgtcgaggtcgatcaggttacctatgacgtgacggtgcccttcatccggatgatggccggaccgatggattatacgcagggagccatgcgcaatgcctcgaaagcgaatttccggccggtgaattccgagccgatgagtcagggaacccgctgccggcagctggccgagtatgtcgtgttcgatgctccgctcgcgatgctgtgcgactccccgtcggcctacggacgggaacccgaatgcctgcgcttcatctccggcgtgcctaccgtctgggatgagaccgaagtgctcgccggcgaggtcggcgaccatatcgtgacggcgcgccgtcacggcgacgtgtggtatgtagggggacttgccggctgggacggccgtacggtgcgggtcgatctctcgctgctgcccgaagggacgtatgcggtggagctgttccgcgacggcgagaacgcggcgcgcatcgcccaagactatgtccgggaggagttcctgctggctcccggtaaatcgttcgatgtgaaaatgttccccggaggcggtttcgccgcccggataaccaagcgatagcgtatgggcatacgtcttagggaaaagatcggttacggactcggcgatacggcctcttcgatgctgtggaagctcttcagcgtctacctgatgttcttctatacggacatctgcggcatcgacgcatgggtggtcggcgtcctgtttctggtgacgcggatctgggattcgctgctcgatcccgtcgtcgggcttctgtgcgaccgcacatccagccggtgggggaccttccggccgtggctgctgtggggcgccctgcccttcggggcgttgggcgtcctgaccttctacatgccggagtggggaacgggcggaaaggtggtctatgcgaccgtgacctattcgctgatgatgatcgtctattcgtcggtcaatgtgccctatgccgcactgctcggcgtcatgtcggccgatccgcacgaacgcacggtgctcgccgcgttcaggatgaccttcgccgccgcaggcagcatggcggtcgtgctggcggtcgaggcgctggtgaaggctttccggccgtgggctgggccgtcggcgagctggaccgcggcggtcgccgtcgtggccgcgcttgcagtcgtgctgttcttcgtgacgttctcaacgacgcgggagcgggtacggcccgtgcgggcggagcggcatccggtgctgctctcgctgcgcgacctgctgcacaacagaccgtggctgatccttgcaggggcagccgtatgtcttcaggtgttcaatgcgttccgggagagcgggacgatctatttcttcaagtattgcgtggccggcgagactgtcggcacggtgtcgttcgccgggatcgccctgaccgggtcggccctgttcctcgccgtggggccgtttttcaacattgcgggcatcgtgctgatccccttcgccgcggaccggttcggacgccggcggacgctggtaggcaccttgctgctcacggccgttttcagcttcgccttctatttcgtgcggcagggcggttattccgtgctgcttctggcgcaggcgctcatcagcctgagcgtcggcggggtgttgccgctgctctgggccatgtccgccgatacggcggactatgccgaacggcgttcgggccgccgggatacggggctgatattctcctcctattcgatggcccagaagatgggctgggcggtcggaagtgccgcgacggcgtggatactgtcgctggccggattcgaagcgaatgccgtccagtcgccggctgcgctcacggttatagggtgtctgcaaagcgtcttcccggctttggccgctttggggacatgtgccttcattctgttttatccgctggccgattcccggcccaaataatgattcgttatgcccaatcctgacatattgaccgagataccgcctatttcaggacaagactgtttcgtcgtgttcgaccgctacaagcgcgaattctgtttccccgtgcatatccacaaggagtacgagctgaaccttgtgtgcggagcgcggggggcgacccgcatcgtgggcgactccgtccgcgaaatatccgacagggatctggtcctgatcacgggttcctacctcgaacacgcgtggctgaacggcaatttttcgaagaatgccgatgtccatgaggtctgcgtgcagttttctcccgatctgttcgaatcggggttcatcgacaagaagcagttctatccgatcaagaagatgttcgagtatgcgcgccgcggcatcgcattctccgaagagacggtctcccgtgtcgagccgatcgtggagaacctgatacgcagcgaagacaggttcgattcggtgcttaacttcctgatgcttctcaactgtctggcgcgcgagagcgattaccatatcctcgcccagcgctccgtgtcgatcgagaacaacgtcaattacgacatgccgcgcatccagaaggtgatgcagttcctgaacgataatttccaccgggacatatccatcgccgaggtcaaggccctcgtgaacatgagcgaaccgacgttcaggcgtttcatcaaacggcattccggaaagagcttcgtgaatctgctcaacgacattcgccttggggcggcttcgcgcatgctgatcgaaaacccgaccaagaacgtttcggagatcgcctacaaatgcggattcaacaacctctccaacttcaaccggatcttcaagaagggaaagggtttgactcccagtccattcaagacgttctacacccagaagaaaatatccgtataaattcaacctaaaactcaaaacgacatgaaaaagaaattgctgttttctgcgtgcgcctgcatggctgttgtcctcggtctcggatgttccgaggtgaacggtgtgccgagccgcgcgccttcggggtatcccgaaggccccaagaccatggtcgatgccggcgccacggccattacccggacgctctacgaaaatctgttcgtgctggccgagcgcggtacgatgttcggccatcagataccgaccctgtacggtctggacaacaacaggaaatggtgggccggcgacgacaccgacctttcggacacgaagtacctgacgggcagccacccggcagtctgcggctgggagctttccaacatcgagctggacatggagaccaatatcgacggagagctgttcaccgaagtgcgcaagcacatcatcgcggcattcggacgcggagccgtcaatacgatttcgtggcattgcgccaatcccgtttcgggcggaaattcgtgggacgggacgcgcgccgtctattcgatcattccgggcggcgagaaccacgaaaagttcaaaggctggctcgacaaggtcgccgatttcatgctgagcctcaagtctcccgaaggcgagcctattccgctgatcttccgcccgtggcatgagcataccggctccggcttctggtggggcaagggaaatgcgacggcgcaggagttcgtcgccttgtggcagttcacgatttcgtacctgcgcgacgtgaaggggctgcacaatctgatctgggcctattcgcccgatatgatccatctcaattcgcgcgacgcctacctcgaatactggcccggcgacgaatgggtcgatattctgggactcgacgcttacgaccgcaacggtgcggactacgaccacaagggattgcagatgatccgcctgatgaagaatatcgcctatacgaagaacaaaccgttggcgctgaccgaaacgggtcttgagaacaacaatcctgaggagtcgaactactgcaacaagaaatggtggacgtcgatgctctacaagattatcgagaacgagcccgtatcgttcgtgctgttgtggcgcaacggcgatttcccgacaaacggcgggcactatttcagcgctttccgcgggtgctattccgagaaggattttatggatttctcccggaaggagcagattcttttcgaggacgacctgccggatatgtacaaaccgctcaaataagcggtccggggagtaaaaaaggatgccttttcggggcatccttttttttgttgcggcggttccggttattcgaattcggccatcacgcgctccattttccggcggatttcggcggtgcagagattgccgatgctgccttcgtgggtgtggcgcacttcgcgcgtcgggcggtactggccgcgctgtacagccatgccgacttgtttgtaggcttcgcggaagggaacgccttcgagcacgagccggttcacgtcttcgaccgtgaagaggtagtcgtatttcgggtcgtcgaggatgtcggcgttgactttcaggtgcgcgagcatgaagtcgcacatcgaaagggtgcgtttgatttcggtcgtcgccgggaagaggatgtccttcagcagctgcatgtcgcggtggtagccgatcggaaggttggccgtgagcagggcgatttcgttcggcaccgactgcaggcggttgcagcggccgcgcatgatctcgaagacgtcggggtttttcttgtggggcatgatgctcgatcccgtggtgaggttgtcgggcagcgacacgaagccgaaattctggctcatgaagagacatacgtccatcgcaaggcggcctacggtggcggcgatggccgcgatggcgctggccgcggcgcgttcgctcttgccgcggctcatctgcgccgccacgacgttgtagtggagcgtttcgaagcccatcagacgggtggtcatcgtgcggtcgagcgggaacgacgagccgtatccggcggccgagccgagcgggttctggttggcgatatgccatgcggcggcaaccagccgcatgtcatctacgagcgtttcggcgtaggcgccgaaccagagtccgaacgacgagggcatggcgatctgcaggtgggtgtaccccggcatcagcacctccttgtattgttcgctcaggccttgcagccggtcgaacagcgtttttacggcgtcggccgtctggcgcagttcgtcgcgcaggaaaagtttgaggtccaccagcacctgatcgttgcgcgagcggcccgaatggatcttcttgcccgcgtcgcccagccgccgcgtgagcatcagctccacctgcgagtggacgtcctcggtgtccggctcgatcgcgaagcgtccggcttcgatctcggcggcgatctctttcagtccggcggtcagctcctccagttcggcggaggtcaacagcccgatcttttcgagcatggcgatgtgggccagcgacccttcgacgtcgtatttcgccagccgcatgtccagttcgcggtcgtcgccgacggtatattcctcgatcatcttgtcgggctcgaagcccttgtcccaaagtttggttgccatagcgtgtgtgtattcgtttctcatttcgtgccggctccgtattgccggcggccggtggtttgcggcggtgcgccgcgtttgcaaatctgtcttccgcacggggcgggtgtctttcgcggcggggattcggccgcctgccgcgcggggcggcgtcagaggattccggcgagttgccggatgaattcttcgtaaatcccgattccctccccgatctccgacataagaacgtattcgtcggccgtgtgggagcgcgacgactctcccggacccattttgagcgacggaaagggcatcagggccatgtccgacgtggtgggggagacgtagctccggcgtctggcggcctgcgcagcgcgtgcgagcgggtgtgcggcgtcgagcgccgaggcgcggatgcgtgtcgagcggggcacggcttgggagcgcagtgccccgcgcaggatttcgactgtctcctcgttggtgtaggcgtcggtcgtgcgcagatcgacgacgaagcggcacgagtcgggcacgacgttgtgctgggtgccggccgcgatctgcgtgacggcgatgccgatcggccccagcagttcggatacgcggtcgaagcggaagctgcggagccgcgcgatgtcgtcgagtgcgatatagagcgcatttatgccctcgttgcgcgccgcatggccgcttttgccgcgggcttcgcagtcgaggaccaccagcccccgctcgccggcggcggcctgcatgcccgtcggttcgccgacgagcgccatgtcgatcgctcccagctgcggaagcagggcgcgcatgccgtgttcgcccatgcactcctcctcggccgaaagggccagcaggaggttgaagggcagaggctgttcgcggaaggtcaggaacgtccgggcgagcgacacgaccgaagctccggcgtcgttgctgcccagaccgtacaaacggtcgccttcgatggtcggggtgaacgggtcgcgcgtataggaggccgccgggcgcaccgtgtcgtggtgcgagttcagcaggagggtggggcgcgccgggtcgaagtctgcggagcgggcgaagacgttgttgtgcagccgttcgggcgccgcgccgcgctcctcaagaaaggcgaacagcaggtcggccgtgcggctttcgtcgcgcgagggcgaaggcgttgcgatgagtctcctgagcagttcgaccgcttccgtcgtttttgcatccatgctcttccgttttttttcggctccggcggtccgggcggaccgccggaaccgggggttatctgatgactgttcccgtgtcgtttgacaggttgtcggaatgtttgatcgtgacgctccgaacgccgtttgcgacggccttgagggcgttctcgatcttggggatcatgcctttgctgacgacgccttcggctttgagcgcggcgtacgatccggcggtgatctcgcggatgagggtcgtctcgtcatcggggtcgcgcagcacgccgctcttctcgaaacagaagaccagctccgcgggggctatctgcgccgcgccgagggctatggccgaagccacgctgtcggcgttgcagttgagcagcgtgccctgtccgtcgtgcatgatggcgcagaagaccggggtgacgcccgcttcgagcaggcgtccgagcagccgggaatcgaccttctcgatgtcgcccacgaagccgtagtcgatcggctggggggcgcggcggcgggccgtgacggcgttgccgtcggcgcccgacatgccgagcgcattgcacccttcggcctgcagtgaggccacgagctgtttgttgaccagacccgcgtagaccatcgtcaccacgtccaaggtgcccttgtcggtgatgcggcggccgtcgaccatctgcaccttcagttcgagccgttcggcgagccgcgtggcgaccttgccgccgccgtggaccagtattttcgggccgggcatcgcggcgaagtccgcgatgaagcgtttcaggacggcggggtcgtcgatgacgttgccgccgatttttactaccgtgattttctccattatccgagtccctccagcaatcttttgagtacgacctgcgccgagatttcgcggttggcggcttcggggatcaccagactgcgcggcgactcgatcacctcgtcggtgacgatcatgttgcgccgcacgggcaggcagtgcatgaagaatgcgttgtccgtaagcgccatcttttcggcgtcgacggtccatgcgcggtcgcggcagaggaccttgccgtagttggggtcggcgtaggccgcccagttcttggcatagacgaagtcggctccttcgagcgccttgcgctggtcgtattcgacgcgcgcgcggccgacgaactgcggcgcaagctcgtatccttcggggtgggtgatgacgaagtcgtaatccgcggcgttcatccactcggcgaacgagttgggcacggcctgcggcagtgcgttggggtgcggggcccacgtcatgaccaccttgggacgctccttggtcttgtactcttcgatcgtgatcaggtcggcgaagctttgcagcgggtggcgcgtggcggcctccatcgagaagacggggcggcccgaatagcggatgaactgctccagcacgcgctcctcgtagtcttcggccttgtcgttgaacttggcgaacgaccgcacgccgatcacgtcgcagtaggaccccatgacgggaatggcttcgagcaggtgttcggccttgtcgccgtccatcaccacgccgcgttcggtttcgagtttccatgctccctgattgacgtcgagcaccatgacgttcatgccgaggttcatcgcggccttctgcgtcgagaggcgcgtgcggagactcgaattgaaaaagagcatcagcagggtcttgttgcgccccagtccggtgaactggtaacggtcgcgcttgatttcgagcgcttcggcgacggcggtgcgcaggtcgccgatatctgccgcacaggtgaatttatacatatcgttttcgttttatcttgttttgtctgtcgcttgcttccggagggcttttgttcgcggcggtgcgctgcgtttccgagtctgccctcccctgactttcctccgcagaggggacttgtcgtattgcgtccgggattttatttcccgcggagcgttgcgtcgaatgcgtcgaggaagcggtcggccagttcgcgcgtcaggcagagcgcgggcagcagccgcacggtcgaagcgcctgcgccgcccgtgaagacgtgttttccgaaaaggagttttttgcggaattccgcgcccgaaccgtcgatctcgatgccgatcatcaggccgcggccgcggatctctttcggtccgtcggccttacgcagttcgccgagcaggtattcgcccgtgtcggcggcgttctcgaccagcttctcgcgctccatgacatccagcacggcgatggccgccgcgcaggcgaggtggctgccgccgaaggtggtgccgagcagtccggggcgcgcctcgaagtggggcgcgatcagcacgccgccgatcgggaagccgttgcccatgcccttggccatggtgatcaggtcgggacggatgccggcccactggtgggcgaagaagcgtcccgtgcggccgtagcccgactggatttcgtccagcacgagctgggtgcccgtttcggtagcggctgcgcgcaggccgcgcaggaattcgtccgtggggcagtggatgcccgaaacgccctgaatgccctcgatgatgacggcggcgaattcgcgcgtcgcgagcttggcgcgggccgcttcgaggtcgttcagcggggtgaattccacgttgggcgtcccgttgaacggcgaacggatggaggggttgtccgtcgcggcgacggcgcccgacgtgcggccgtggaaggctttggagaaggcgagcactttggcgcggcccgtctggaacgacgccagcttgagtgcgttttcgttggcctcggcgcccgaattgcagaggaaaagactgtagtcgccgtaacccgatgcgcggccaagtttttcggccagcgcggtctgaagcgagttttcgaccgaattggagtagaatcccagccgggcggcctgctccgagatcgccttcacgtagtcgggctgggcgtggccgatcgagatgacggcgtgtccgccgtaaaggtcgaggtactcggtgcctgcggcgttgtagacgaagcagcctttgccgcgcaccggctcgacggggtagagggagtatacgttgaatagtgtcatggcaaaaattgtttggcatcttgcttccgattgcggtaatcacggcgtgccgccgtgtatgcaagtctgatccaccccccccaaacccccgcctcaggcaggggcttggtccgccgcatgcggcggaaagcgaatcccggaaagcgatttcgttgtttctaaaaagcggacgctttgagccgaagtccttcgccctcgtccagtccgaacataaggttcatgttctgcacggcctgtcccgacgcgcctttcagcaggttgtcgatgaccgacacgacgtgcagtttgccgtcgtatttggccacgctcagcagggccttgtcggtattgacgacctgtttgagatcgacgctgccggcggcgacgtgcgtgaagagggccggggcgtagaaatcctcgtacagcctgcgggccgccgtctcgtcgagcgggcagtcggtgtagacgctggcgaggatgccgcgggcgaaatcgccgcgcatcggcacgaaattgacggctttgccgaagccgggctgcaggcgtcgcaggttgcgtccgatttcgatcaggtgctggtgcgtgaaggctttgtagaccgaaatgttgtccgtccgccaactgaagtgggtcgtggccgagggtttgacgcccgcgcccgtcgaacccgtgacggccgtcacgtgcacctcgcccgtcagcaggcccgccgccgcgaggggcagcagcgccagctggatcgccgtggcgaaacaacccggattggcgacgcgctccgccgtgcggatgcggtcgcggttcagctccggaagtccgtagacgaagccgtcgctctcgtcgcggaagtcctgtgcgaggtcgatgatcttcacgccggcgggaacgtcgttcgcttcgagccatttgcggctctcgccgtgcgccgaacagaggaacaggacgtcgatcgacgcgaggtcgcaggtgtcggcgaagcgcagttcggtgtcgccctccagtccgccgtgcacgtcggcgatgcggttgcccgcattgctggtgctgtggacgaaggcgagccggacctgcggatggtttaccaagaggcggatcagttcgccggcggtgtagccggcgcctccgatgatgcctgcgcgtatcatttctcgttgcgtttctggacgttatggtagattttgatctggttgccgaggatcttcgtgaagcccttcacgtcgtcggccgtccacgccttgttcacctcgccgtattcgccgaagtcggtcttcatcaggtcgtaggtcgaatcgacgcccacgagcgtgtagctgtaggggcgcaggatcagttcgacggtgcccgtgacgttgcgctgcgacgagacgagcatggcttcgatgtcgcgcatcaccggttcgaggtactgcgcctcgtggaggaacatgccgtaccagttggcgacctgctccttccagtagatctgccacttggtctgggtgtgcttttcgagcatcctgtgcgcggcgatgatgaggatcggggcggcggcttcgaagcctacgcggcccttgatgccgatgatcgtgtcgccgatgtgcatgtcgcggccgatgccgaacttcgagccgacggcctccacggcgcggatggcctcgaccttgtcggcgtagggcctgccgttcacggcggcgatttcgccctgctcgaaggtgattttcagccgctcctcgcccgatgcggtgatctggctcggataggcctcttcgggcagcgtctgctcggaatggagcgtctccttgccgccgatcgacgtgccccaaagccccttgttgatcgagtactccatcttcttgaagtcggcttcgaagccgtgcttcttgaggtagtcgatttcgtattcgcgcgtcagggtcatgtcgcgcgtcggggtgatgatttcgatttcgggggcgagcacctgaaacgtcaggtcgaagcgcacctgatcgttgccggcgccggtcgagccgtgggccacgcagtcggcgccgatcgacttggcgtattcgatgatggcgatggcttggaagatgcgctccgagctgaccgaaatcgggtaggtgccgttgcgcaggatgtcgccgaagaccatgtatttgatgctcttttcgtagtactcctgctcgatgtcgagcgtggcgtgccgcacggcgcccagctccacggcgcgtttctcgatgttcgcaagctcctccttggagaagccgcccgtgttggcgatggccgtgtaaacgtcgtagcctttctcctccgaaaggtattttacgcaaaacgaggtgtccagaccgccgctgaacgccagaactactttcttcttttccattttatatcggttttatttacttcaggtgaaacagtttcttgaatttgttcttgaagaacatgacgtagggcgcccagcgcgactgcgactgcggaggctccttcgccggatcgtacagcatgcccgtacagagacacatgcgccggttgttgcgctgcaggatgtcgtaattgcagcatccctgacaaccccgccagaactcttcgtcctcggtaagctccgagaaggtcaccggcacgtagcccatgcgcgaattgagcttcatcacgggcagcgacgtagtaatactgaataacttggcgtacggaaatcgtcgtcgggccagctcgaaggtgcgtcgtttgatacgctccgcgagtcccatatggcggtactccggatcgacgataagtcctgaggtggcgacaaaatcgccgtgaccccagcactcgatgtagctgaaaccgattagtttctcaccgtccagcgccacgacggccttgccaccggtcatttttgcggcgatgtattcgggcgaacgtttggcgatgcccgtgccacgctgcaatgccgactcgtagatcaggtcgcagatacgctgggcgtagtgggcgtgcgacgagtcggcaaataagacgctgatagagttgttatccatttacttagttatgtgggtaaaattgtgtgtgaatcagttgttgatgcggaaggcgcgctgaacgcccttgatgcgcatgatcgaatggatgagcgtatcgaccacgcccgcgccgggcacctcgacgctcaccgtgcccgcgatgcagccgttggccagcgaggcgaagttgatcgagcggatgttgagtttcaggtcgcggctgatgacttcggtgatgtggttggccatgccggtcgtgtcggcggcgacgatgcgcagcgagacgcggaacgcaccttcggccgtcgaacgccagcgggcgtcgatgacgcggtaggggtaattctcgcgcatgcgcttggcgttggggcagtcgcagcggtggatcgtgatgcccgaattgatcgtcacgaagccgaacacctcgtcgcccttgatcgggttgcagcatttggccagcttgtactggatcttcgagatgtcgtcgtcgatgaccagcgcgtcctgcgccgcgggactctccttggcggtgtggaccttgttgcgttcggcttcggccgcagcggcgcgccgctgctcgtcggcttcgcccgaaatatggcgcgtgaggatctccttgatggtccccagatcgaccttctgcgtggcgatcagggcgtagatttcggtgcctgtgcggactttgaagtatttgaccagataggctacagcctcgtcgatcgtgagcgggaatttccagttcttgagcttgcgttccagctcctcgcgtcccatgcgggtatgcttggcctgctcctcgcgcaggaacgatttgatcttgttgcgggccttcgacgtgaccacgaagttgagccagtcggatttgggcgtctggttcttctgggtgaggatctcgacgatgtcgccgttgcgcagctgctcgcggatcgacacggcccggttgttgaccttgccgccgacgcacgtcgagcccagactggtgtggatgtcgaatgcgaagtccaagagcgaggccccttcgggcagcttgcgcaggtcgccgttgggcgtgaagacgaagatctcgcccgaagcgggtttggcatcgaaacgctgcgccagcgagtgggtggtgtcttcgagcagttcgcgcaggcgacccagccagacttcgctggtctgcgcgccctgattcacccccttgtagcgccagtgcgccgcgatgccgcgttcggccacggcgtccatgcgctcggtgcggatctgcacctcgacccagcggccttcggccgatacggtggtgtgcagcgattcgtagccgttggacttcgggatcgaaatccagtcgcgcatgcggttggggttgggcgtatagaagtccgtcacgaccgaataggccgtccagcactgcggcttctcctgctctttcgggcagtcgatgatgatgcggatggcgaagatgtcgtaaacgccctcgaacggcacgtgctgtttgtgcatcttggtccagatcgagaagatcgacttcgtgcggctcttgatgtggtatttgatgccgagtttgtgcagacgctcctcgatggggaccagaaaccgtgcgatgaaggctttgcgttcgtcggcgctctcttcgagcttggtgacgatgtgttcgtagtccttcggttcgaggtatttcagcgcgatgtcctccagctcgcttttgagactgtagagacccagcttgtgggcgatctgggcgtagaggttcatgctttcccagctcttcttgcgccacttctcgtgcgggaagatctccagcgagcgcatcacttcgagccggtcggccagcttgatgaggatgacgcgggggtcttcggagtaggagacgagcaggtcgcggaaattctcggcctgctccttggcgaccttcagtttcagttccgagatgttgcacatcccgatcgtgatgccgacgacctgctcgccgaagcggctgcggatgtcggcggtcagggcgaggaactcttcggccgggagctgtttgtgggccagacgcaccacgtcgtgcaggatggccgagatggtggagttgcgtccgagtcccacttcggagatcacgattccggccacggccgcggcatgcgtcagcagggggctgccgtcatagcgggtcagggacgcaagcttcccgtcggcgtagaccagcgcctcgtccacgagtgcctgagtctgctccgagaagttcgcgcgcacgagcgtgcggagtttttcgtaacgtgaaaagtccatttttccctaaccgcataaccttgacgacaaagatatgaaaaaaattcataaatttggcacatcggaccaatacacccgattatgacgaagaaaaaggatgcttatgtcccgaccgtgggggaggaggtcgccaatacggtcacgcacggcgtgatgtcgctgctggcgctcgtggcgcttccctttgcggccgtgtgggcctacgcgcacgaccccgaccgcattctggcgtcggtgtcggtgagcattttcgtgatctcgatcttcctgatgtttctcgcttcgacgctctaccattcgatgaatccggcctcgaaacacaaggccgtgttccatatcctcgaccatattttcatctacgtcgccatcgccggaagctacacgccgatcgcgctgtcggtgatcggagggtggcagggcgtcttcatcacgatcctgcagtgggcgatggtgctgttcggcatcttctacaagtcgctttcgcgcaagacgattcccgccctcagcctgacgatctatctggtcatggggtggacgatcgtatttttcatgccgcttttcgtgcggcaggcgtcgacgccgctgctggcgctgatcgccgcgggcggcgtgctctatacgctcggcgcgtggttttatgcccggcagggattccgctaccaccacatggtctggcacctgctgatcaatctggccgtggcggcccattttacgggaatcgtgttttttctgtactgagttgatacgggcagtagggggaaaacgccccgaaacctgagttacggggcgtttttgtgctgactcggagggagcgcatgccggtttgcctcaatgcttgtagacgacgtaaatatggtctttcggcagggcgtaaagccggcgttcggcctcggagaaggtcgcggcgtagtcgatgtccgcggcctcgaagcccgcttcgcgcagccggtctgtgtagtccgcgccgtagatgcggcggtggtcgtattgtccgaagatgcgtgtccgctcttcgggatcggtgatcgagtcgtcctcgtaggtctgttcgtagtccggttccacgggcgagagcaggatgccccagccgccgggtttgaggatgcggtagagttcgtgcagcgccctgcggtcgtcggcgacgtgttcgagcaggtggttgcagaggatcacgtcgaccgaatcgtcggccagcggaatctgttgcacgtcgaagtgcaggtcggccagcgggctttcgaggtcggcggtgacgtactgtcccggatgccccttgaaatggggtttcaggtggcgcatgatgcagacttcgggcgcgatgtggagcgtgcggggaaaactcgtcagcaggtcggtctcacgcgtgaggtagagccacagcaggcggtggcgttccagcgacaggcatttgggacagagcgcgttggcccgtgattggacatagccgtagggcatgaatctgcggtatcgggacccgcagaccggacattcgacaccccggcctttgtagaacaggcccgcggcgggaacggcccagccggcgacgcgctgaaggagcggccgcggcacgtggttgagcatccatttgataagttttttcatcgcaggtgaggttttattcccgccagtgttcggggcggttcagggcgtcggcgcatacgacccggcctttgggacctgaaaatccgtcgtcggtcaacgcctgcgccatccagtagtccgcatgtttttccagaatcggataaggggccggaaatcccagtttttccgctccgggaatgaatccgtggcgcgggtagtactccttgtgtccgagtacgaagacgagtttcgcgccccgctcccgcagcagctgcagcccctcggcgatcagcagtccgccgacgccctgcttctggcaggagggaacgacggcgagcggtgcgaggatgtagaacaacggtcgctgcacttccgctccgacgatgcggcatcgggtgaacaggatgtggccgacggcctccccgtcgcgcagtgcgagcagcgagacggtcggttcggcagtcggatcggacagcagctcggcggtcagcccggcctccttgtcgtagccgaagccctttttatgcacttcgacgatcgccgcgaggtcggcggggacggtttcacggatgacgatttccccggacatcacgattccagtattttggaaacctcctcttcggccttgcgcagccgcgatttgcagccggcgatcagctccgtggcacgtttgacctcggcggcgaggctgtccacgtccatctcttcgttgcggaagcgggcgaggatcttctcgatctgggccatcgattcggcgtatgtcatctctttttttgccatatctgtaattagtttgccggattttggttatgctgattttgcagttctccgagtataattgtccgatagcgggcaatgtcgagcgcgtcatcgaatttacgggcgaaaagagttgctgattgtggattctctcttcggttttgcgaatcgaattcggagagtgggtatagatcgtcggtggtgaatgtctttggatgcgctccgggacatgaccagtccgtgtatacgagggagtagtccgcattacggtcggcgaacggagaattgcatagaagcgtctggaaaaatatttcatcggctccgtggctatacttgaatgcctgcaggtaatcgggatttgtttgcaggtaatcgaaaaaataatccctcagacgatgcgtgatcgcgatccactgactgcctttttgcagtggcggaatccggttgaaatagggattgacagaacgcatgaagcacttcatcgccgtgcgtttgacacgacgcatgaaagtcgatttgtctgaaaaaaaatgacgaaggcgtacccagttcgcttcatcgaatgtgatggccggattagtggatataaattcccgtttttcagcataggccgtgtgcagaaaggtacgcaattcgcttatggggcatagtggtaaagtgtcgcccgaaatcaatacaatataatgaaaatttttattttgagtttcggcgaaaagccgaagagtgctttcgaccatactgaagcctgcccaatagacttttgtcctcggttcgagaaaatgtaccccggtgcgatctctgagcggtgcgaaatcttggatgcgggatttgccgtccacgtggataaaaatttcattgcccggaacattaagtatgcggataagttcttccagaacgggtgtgtatttgtggcataatatgcaaaatgcgatccgaaatttgtgagcagtcatatgatgaactgtttttaataagcgttatatatatatccaacgataccgcctttgtattcccgcccttgtttaacttgttcagttacttcggcccaactgtatgtgtagaagctatctttattttttccgtaccacatggggtataatggtattgtattattggctggattttttaagatgtatccggcttgacctttatattcccggccttgttttatgtcgttttgtactgcttcccatgaggtggtgtaaaatgtgtctttagtttcgttataccacatagcgtatagtgggactgtattattggtttgagttgctaaaatgtatccttttaaccctttaaattctctccccgcttgctgttcgtttaagactgtatcccaagagtaaacgtagtatgtatctttcgatttgctataccacatttcataaaatggggttaactttaaagatgttatctgtttgttcgcgatatattgttcgatcgcatttttgacttcagttttttttgaggcgttggaaatgaattcatagatcggataggctttattccattcgatgtttgtcaaaacactgcttccgtccaatgatatttggctgtcccagttttggatgtcaattgtcgtcggataattttgatctagactatactttaaattgcttcctttgcctccaaaaaaatagacatataattcttgggatgcattctcttttgctaaaacttcattggtaacagtctcgccgccagcgttaaatttaataccgagtttacctaaaacagcactaaaacctgcagcaactgttttttttcgtgttgtttggtcggtggtttttgtaaaacatgatctgtacattaatctgtatctgccgcccaatgtaatatgagttaaaacatgggtcccatatatttcaattattttttcggcggaataacggtttacatcctcaatgaattccggagaaatataggctgagatacgtgatatgtcatcgttaatataaatgattcgatgatttcggatacattctaaacttgcaaatgcatatttggttgaataggaataactgtcaaaaaagtccttactcgaagaaaaagttccggaaaaaccgaattttccgactcccatgttgagtccacctttcatgttggatttttttgtaacttcttttagataatcttcggcagtagctccgtagcaaaaaaagtcgctaccccaagagtttgtatgggtaattaaacggttcggaaattcccgttcgtatttttcgatatcaataacttgtccccggacggatgttgggtttaagtaatcttcagtgacgtcgtatccccaaccaaggacatcaaatttattgtcgccaccacttcgcgttgttgggacagttttatgattggaggtgagatttgagaaatcttttgtacaagctgctaatgtagatgcacaaaacaaaaagagtaagatttttttcatagagagataaagttagataggttaagttaggaatgttcgagactattatgacgttaagaatgttttttgcgcggtgccgtggatcgtgccgtcggcgacttcgatttcgagggcgtcgcctttgcggacgccgcgggccgacacgacggctttgccgcccgtgcggacgacggcgaagcccagccggaggatgcgttccggagagcggccggcgatcaattccgcggcgttgtcgagtcgtgtggcctgccgtgcgaggaaattgcgcaccgcttccggcagcagggccgaaaggtgttctgcgcggagccgctgccgcgtgagcaggttgccgctcatctggcgcaggtcgcccgagagccgttccagccgcacctcggaggcatgcatggcggctttcgtggcatcgtgcagttgcagggccgcgtagtcgagccacccctcggcctgcgtcatccgttcgacgagccatccggctacggctgtcggggttttgagcgccgtgtgggccaccatgtcggcgacgctggtgtccttgtcgtggcctatgccggtcaggatcggcagcgggaactgcgccatgtgggcgcagagccggtaggcgttgaaacagttgaggtcgctggccgagccgccgccgcggatgaggaccacggcgtcgaattcgtccatccgctctgcgacggcgcataacgccgtgacgatcgactcttcggccgccgcgccctgcatgaaggcgtcgaacagcgtcacctcgaaacggtaggggcttttggtcagctccttgcggaaatcctgataacctgcggcgttggcgctcgatacgaccgccacgcgctgcaccacgacgggcatcggcgcttcgcggttcatgtcccagacgccctcttgctgaagctgggcgatggttatctgccgctgccgttccatgtcgcccagcgtgtaggtggggtcgatgtcggtgatctggagcgaaaatccgtagagttcgtggtaattgacggcgactttggccagaatcttgattccggcggcgagccgctggccggtttcggcttcgaagtatcctgcgatgcggggataggccgtgcgccagatcacggcgcgcgactgggccagcggaacgccgttgtcgccccctttttcgaccagttctaggtagcagtggcctgagtaattgacctttatttcggagatttcggcgctgacccatacgggcagggcgaaacgctcgtggagggtctccttcacgagccgctgcaattgggaaagggtgatatgtgagtgcgtctgcatgggttagcgccagaccagttctacctgacgcggcatcagcttgccttcgggaagctggatgtgcaggatgccttcgctctcgacgggcgtgccgtttttgcgggccggcgtccagcggggcgcttcggcgacggctttgagcacgcggcgtttgagacggctgtcggtcgattcgagttcctgagccacgaccgtgtcgccttcgggcgttacggtgtaacgcaggacgatgcgggcggccggttcgtcgtcgccccacttcacctgccgggcgatgtagccgctgaaggtggagtcggcggtgaaaacggcggactggtcgtagcggagcgtgacgagcatcaccccgtttgcggctttgtcgccgtagcgggcgatggtctcctcgtcggccgggagcatctcgacgttctcgatgtcgtcgggcgggatcgacgcgatctgctcggtttcgacgccgttgactatatataaaggctgctgcgccgcaacgggaagcgttgcggcgagaagtgccgatataaacagaaagtatcttttcatgcgttgcttttcccgataaacggtcgctggggcgggaatattgcccggccgcaggcgtcgttcggtatgtgcgaagataacggttttgctgcggaacgccaaattttccagcgattttcggtccgcaggatggtttgcaggggggtctttccgggtgttgcgtgcggagcgggtctttcgggccggttttcgcggggcggtatttgccggtgcatttgccggatgtcttttgccgggccgggtgtcttttcgggctgtccttgatagcgcgtcttgcgggggctttagcagggcggcctttaattgtgcgtcttgcggagggggcttcgcagagccgctcttgccgggcgtctttgggactggctgatgtttccgaacccagcggcaggggcggaacaacgatgcggctttttgtccggcgtggttttggaccgggacggcttttgaccgggtgttttttgtccggcgtggctttggttcggggcggcgttgaaccgacatggcttcgggccgggcgtttgcggattccgcggcggtcgtatggcgacgctaccggatctcctcccacccgcagcgggcgaggtcggcgcagccgttggccttgaagcgtacgccttcggcttcgagcagctcccgctgccgcgtccatccggggacggtgcggcctgcgctgttgacgacccggtggcagggcagacccgccggggcttcggcgagcgcgcggcccacccggcgggcgtggtcgggcatgccgaccagccgggcgatctgcttgtagctgacgactctgccggcggggatttccgccacgacggcgtaaacctccgcgtcgaagttttcgggcatgcgcatggggcgtgccttgggcggattagagttcgctctccttcagacgctcggcgttctcggccacgatcaggtggtcgatcacgtcctgaatgtcgccgtccatgaaggcggagaggttgtagatcgtgtagttgatacggtggtcggtgatgcggccctgcggatagttgtaggtgcggatcttggccgaacggtcgcccgtcgagaccatcgtcttgcgcttcgaggcgatttcgtcgaggtacttcgagtattcgaggttgaagacgcgcgtacgcagctcctcgaacgccttgtcgaagttcttcagctgggatttctggtcctgacactgcacgacgatgcccgtcgggatgtgtgtcaggcggatggccgaataggtcgtattgaccgactggccgccggggccagacgcgcagaagatgtccttgcggatgtcgttcatcgaaatctcgacgtcgaactcctcggcttcgggcagcacggccaccgatgccgccgaggtgtggacgcggccctgcgtctcggtctggggcacgcgctgtacgcggtgcacgcccgactcgtatttgagcgtgccgtagacgttctgacccgtgaccttgagtacgacctccttgtagccgcccgcggcgccgtccgagaacgaggtcatttcgtagcgccagcccttcgactcgatgtatttggtgtacatgcgcagcaggtcgccggcgaaaatggccgcttcgtcgccgcccgtgccgccgcgtatctccatgatggcgttcttcgagtcctgcggatccttggggatcagcagcagcttgatctgctcctccatctgctcgatggcgggttccagctcggtgatctccccgcgcgccatttcgcgcatctcctcgtccttgtcgttggcgaggatgtccttggcttcggcgaggttggccaaagccgtgcggtaacgttccgaggtctcgatgatcggttccagctccttgtactccttgttgagctgcacgaactgcttgacgtcggcgatgacttcggggtcggtgagtttctgtcccgtctcctcgtatttcagtttcaggccgtcgagacgactcaaaatggtgttgtctgccataaatgttcgttttgtgcgcaaagatacgcaataatcggaaaacggcaatgcgccgtccgaaaaaacggcgaaagggcgtccgcatggcggaacaccctttttgccggtcgtgcagcggctatttgtcgattccctgcagccagtcgagcacggtctgctgccactgctcccggtatttgaaattcttgcggatgccccagccgtggccgcccgtcgggtagatgtgcatagaggccttgacgccgttgtctttgagtgcgttgtagtagagcgtgctgtttacgggcgggacgacgcggtcgtcgtccgaaagcagcagcagggtgggcggggtttcgctgctcacgcggttctggagcgagtaccatgtgtcggtctccgcactgcgcttgtcgcccagcagggcgttgaacgacccttggtgcgccttgcctttttcggccgtgatgaccgggtagaagaggatcgagaaggcgggtttggtgcgggcgagcgtcgaagccgaggcggcgagatgaccgcctgccgagctgcccacgatgccgaccttgtccgccgtgaagcccgtggctcccgcttcgagtcccatcatgatgcgaagggcctgctcgacgtcctccagcggcacttcggggtggccgttgggcatgcggtatttgagcacggcggccgtgatgccgtgttcggcgaaccactgggccatttcatagccttcgtaatctatgcacagctttacgtaaccgccgccggggcagattacgacggcctgccccgtggctttctccggagcggccgggaagatgtagagcaccgcttccgaaacgtcggtgaggcggttcttttcgggttcgcgttcgggcgtggcgatgccgttgccgtggggtgcggtcttgttgtcccagattttcagcgtgcgggcctgtccgtagtcttgtgccgttgcggtgcctgccataagcagaagtgctgtcaaagtcgttgcgattcgtttcatggacgtgtcgttttggtgcggatcagatgacgatattgatgatcttgcccggcacgacgatgacctttttcggggttttgccttcgagccatttctgcgcttcgggcagcgtcacgacgtcggtctgcatctgggcgggcgtcagcgacgtggcgtactctttcttgaagcggagtttgccgttgatcgaaaccgggtactcgaatgcgctctgcgcgaggtgtttctcgtcgtaaaccggatagtcggccgtgcagaccgaggtggtgtgtcccagcgccgcccaaagctcctcggcgatatggggcgcgaagggggcgagcagcacggtcagcggctcgatgatctcgcgcttgttgcactcgcccagttcgttgagacagatcatgaatgccgagaccgaagtgttgaacgagaagttctcgatgtcctcgctgaccttcttgatcgtcttgtgcagcgtgcgcagctccttttcgtcggccttctcgtcggtgacgatcagcctgccgtcgcggtcgtagaacagccgccagaaacggcgcaggaacttgtagacgccgtcgatgccgttggtgtcccacggcttggactgttcgagcgggccgaggaacatctcgtacatgcgcagcgtgtccgcgccgtagttttcgacgatgtagtcggggttcacgacgttgtagaacgatttggacatcttctcgatggcccagccgcagacgtatttgccgtcttcgaggatgaattcggcgtccttgtattcgggcatccacgcgcggaaggcgtcgatgtcgaggatgtcgttgcggacgatgttcacgtccacgtagagcgcctgcgtccggtactgctccttgagacccagcgagacgaacttgttggtgccgacgatgcggtacacgaagttcgaacggccctgaatcatgccctgattgacgagtttacggaacggctcctcctcgcataccacgccgaggtcgtagaggaacatgttccagaagcgcgagtacatgaggtgtcccgtggcgtgctcgatgccgccgacgtagaggtccacgctgcgccagtattcgtcggcttcccggccgacgagcgcctgatcgttgtgcgggtccatgtagcggaggtagtaggccgacgatccggcgaatccgggcatggtcgaaagttcgtagggccagccttccggcgtcgcccactccttgacgcgggccagcggcggttcgccctgctccgtggggccgaagtcggcgacgggaggcagttcgagcggcagtttgtcctcggcgagcgggcaggcgatgtcgttcttgtagtagatcgggaacggctcgccccaatagcgctggcgcgagaagatggcgtcgcgcaggcggtagttgatgcgcttgcggcccaatccgcgccgttcgatttcgtcgaacatgagaccgatcgcctcttttacatccttgccgttgaggaaatccgagttgattactttgcccgatttggcgtcgtacgactcctgcgaaatgtcgccgccctcgactaccggaacgatctccagcccgaagtggcgggcgaaggcgtagtcgcgcgagtcgtgcgccggaacggccatgatggcgcccgtgccgtagcctgccagcacgtagtccgaaatgtagatcggaatggctttgccggtgaagggattgacggcgtaagagcctgtagcaacgccacttacacgtttcgtctcggcgatgcgttcgcgttccgaacgcttcttggcctgacagatgtactcctcgacggcggcccggttttcgggcgtcgtcaggctgtcgacccactcgtgttcgggggcgatgaccatgaaggtgacgccgaagatcgtgtcggggcgggtggtgaatatttcgagtttccggtccgaatccttgatgtcgaagaagacctgagcgccttcggagcggccgatccagttgcgctggatctccttcagggagtcgctccatgcgagtttgtccagtccgtcgagcatgcgctgggcataggccgtcacgcgcagaagccactgcttcatgcgcttctgctcgaccggatagccgccgcggaccgaaagtccgtcgtgcacttcgtcgttggccagcacggttcccagtttcgcacaccagtttaccatcgtgtccgcgcggaacgcaaggcggtagttctgcagtgtctgctctttctcggcctccgacatggcgcgccactcttcggccgtgaagtgcagctcctgcgtgcaggcgacgttcagcccttcggtgccgttccgctcgaaggccgcagtcagctcctcgatcgggcgggcctgctgcctgtcgttgcagtagtaggagccgaacattttgaggaacgcccactgcgtccatttgtagtagcccggatcgcaggtgcggacttcgcggtcccagtcgaacgagaagccgattttgtccaattgctcgcggtagcgggcgatgttctgctcggtggtgacggccggatgctggcccgtctggatggcgtactgttcggccggaaggccgaaggcgtcgtagcccatcggatgcaggacgttgaagcccttctggcgcttgtagcgcgagtagatgtccgaggcgatgtagcccagcgggtggcccacatgcaggccggcgcccgacggataggggaacatgtccagcacatagaatttgggccgcgacggatcggtctcgaccttgtaggttttatcctcctgccagcggcgctgccacttggactcgatctccttgaaattgtactccatgatatagctcggttctgatttgtcgctttgttgcggatttcccgcaaagataggaaaaaatgttttacagggtgcaaaagggtgtgaaaaaaggcgctcctgcggggagcgtctccgggtgcggcggcggatgcggatttccgcagccgtttcgccgggtgcggacgggcgttgccgtgtcgcggcggtgtcgtgctgtaccgctgtcgcgctgctctgctgctcttccgcagcgtggagctggggtgggctgctgtcttgctgcgccggcgtcgtgccggcgcagagtgtcgccgacgcgccgcggcggtctcttgcgggcggttaattgatcaggatgctcgtcactttggcgccggggtcgaaatcctgcggcgagatgcgcggggtgacgccgccggcgtgtgcttttccgagctttttccggccttcttcgccgagtcccgaaactctgtatgtcatgccgttgagggtgatgacgagccgtccgtcgttgtcggtctgggagatgccgccgttttcgaaaaggtggtttacgtccgttcccggcgcgatgccgtccgttgatccgactcccggtccgaaaatttcgatcgattcgatttcgtcgccgtacgcccgcgcctccatgaccggctccccggccagcgtgaagcgcagcacggtctctcctgcgggagtccggtcggttgtgaatgtgtcgtaaagccccggatgcgacgccgggatctgcgcggcggacatggtgagcaggaccggtcccgcgccgagcggattggccgtgaaaaggggctggcggcggctgtcgcaggccgaaatgcagagcgccgccagtgcgaacgcaaaagtcgtgaggagtcgtttcatgcttcgttcggaatttttgcaaatatagcgaaatcggccggatggccgcgctgccgcggtcggtgcgtgcctacgcccggaacggatgtaagccgatgataaatagccggttgttgatttgtgtataagtaaaaagttatatgctttatatttgtatcagtaaaaagaattgcaaaacggctgaaatgcaggaaaacagcgaaaaaagatgctcatatatattgtaattccgaaaaaatgcgtacctttgcagtccattttggacaatggagatagattttttaacaattaaaaggacagtttaagaaatgccaactattcaacagttagtgagaaacggtcgagttcgcatggaggataagagcaaatctccggcactcgccgcgtgtccccagcgccgaggcgtatgtacccgcgtgtacaccacgaccccgaaaaagcctaactcggctatgcgtaaggtagcacgtgtaagattgaccaacggcaaggaggtcaacgcctatatccccggagaaggccacaacttgcaggagcactccatcgtgcttgtccgcggcggtcgtgtgaaggacctccccggtgtacgttatcacctcgtgcgcggcgcgctcgactcggcaggcgtggacggccgtcgtcagcgtcgctcgaagtacggtgcaaaacgccccaaggccggtaaataatcacaagaaacattaattttagacaattttcgaataaacaatgagaaaagctaagccaaaaaagcgaattctacttccggatccgaagttcggagacgtgtccgtgacccgtttcgtgaacaaccttatgctggatggtaagaagagtattgcctacaccattttctacgatgcgttggagctggtgggcaagaagatgaaggatgctgataaatctccgttggaaatctggaaacaggcccttgagaacatcacaccccaagtcgaagtgaaatcgaagcgtatcggcggtgcgacgttccaagttccgatggaggttcgtccggagcgcaagatttctatttccatgaaaaaccttgtcctctattcccgcaagcgcgccggcaagacgatggcagatcgactctcagcagagataatggatgccttcaaccagcagggcgccgccttcaaacgtaaggaggagatgcaccgcatggccgaggccaacaaggcattcgcacactttagattctaaaaaaggagactgacagatggcaaccagagatttaaattacactcgcaatatcggcatcatggctcacatcgatgccggtaagaccaccacgtcggagcgtatccttttttacacgggcaaaacccacaagatcggcgagacgcacgaaggcgctgccgttatggactggatggttcaggagcaggagcgcggtatcacgatcacctcggccgcaacgaccgcattctggaactacaagggcaatcagtatcagatcaacctgatcgacactccgggacacgtggacttcaccgtcgaggtggagcgttcgctgcgcgtgctggacggcgccgttgcgacgttctgcgccgtgggcggcgtcgagccccagtcggagaccgtatggcgtcaggccgacaagtacaacgtcccccgtctgggttatgtcaacaagatggaccgcacgggcgccgacttcttggccgtgtgcgcgcagatcaaagagcacttcggtgcgacggccctgccggtcgttcttcccatcggcgccgaggacaagttcgagggtctggtagaccttatatataataatgcgatctactactacgacgacaagaccgtgcgcgacaacttcgagctgaaggagattcccgaatcgatgaaggccgaggctgccgaatggcgcgccaagctcatcgaagaggttgcggcgaccgacgacgccctgatggagaaattcttcgaggatccggattcgatcacggccgaggagctgctcgcagctatccgcaaggccacgatctcgatgcaggtcgtgccgatgctctgcggttcgtcgttccacaacaagggcgttcagaaactgctcgactacgtgatggctttcctgccttcgccgctcgacgtgcccgcagtgacgggtatcaaccccaaaaccgagaaggaagagacgcgtaacgcctccgaggacgatccgttctgcggtctggcgttcaagatcgctaccgacccgttcgtaggccgtctggctttcgtgcgcgtttactccggtaaactggacgcaggttcctatgtgctggatacccgcagcggcaagcgcgagcgtatcagccgtatctaccagatgcacgccaacaagcagaatccgatggagaccgtcggcgccggcgatatctgcgctgccgtaggtttcaaggagattcgcacgggcgacacgctctgcgccgagaacgcaccgatcgttctggagcagatgaccttccccgaaccggtgatcggtctggcggtcgagcctaagacccagaaggacctcgacaaactcggcatcgcgctgggtaagctggccgaggaagaccccaccttcacggtgcataccgacgaggattcgggacagaccgtcattagcggtatgggcgagctgcacctcgatatcatcgtagaccgtctgcgccgcgagttcggtgtggagatcaaccaaggcgctcctcaggtcaactacaaggaggcgctcaccaagacggttcagcaccgcgaggtcttcaagaagcagaccggcggtcgcggtaagttcgccgacatcatcttcgagatcggtcccgccgacgaaggtcagatcggactcacgttcgtggatgaggtcaagggcggtaatattcccaaggagttcattccttctgttcagaaaggttttgcttcggcgatggacaacggcgctctggccggctacaagatggactcgatgaaggttaccctcaaggacggttcgttccacccggtagactccgaccagctctcgttcgagatcgctgcccgtaacggttaccgcgcagctgctcccaaggccggttcggtgattctggagcccatcatgtccgtggaggtcgtgacccctgaggagagcatgggtgatatcatcggcgacctgaacaagcgccgcggacagatcaccggcatggagtccaagggcacggctcgcgtcgtgaaggccaaggttcccctgtcggaaatgttcggctatgtgaccgtgctccgtaccatttcgtcgggccgcgccacttcgtccatggagttctcgcacttcgaggaggttcctgccaacttggccaaggagatcatcgagaaagcgagtggtaaacgtaaggatatagaataagaaaacatatgaaccagaagattagaatcaagttaaagtcattcgatcacaatctcgtggacaaatcggccgagaagattgtgaagactgtgaagagcacgggcgccgttgtgagcggtcctgtgccccttcccacgcacaagcagattttcacggtgaaccgctcgactttcgtcaacaagaaagcccgcgagcagttccagctctgcaccttcaagcgcatcctcgacatctattcgtcgacgcccaaaacgatcgacgcgctgatgaaactggagcttccctcaggtgtggaggtcgaaatcaaggtgtgataacggaaggcttgtacctgttgagtatagcaacgaaagatcactttatttataacaaacaatcgacaacaaatgtcaggacttattggaaagaaaatcggaatgacttccgtttacagtgccgagggtaagaatataccatgcactgtcattgaggctggtccgtgcgttgttacgcaaatcaagaccgtggagaaggacacctacgaagcggtacagattgcctatgacgagaaaagtgaaaagcacaccagcagcagtttgttaggacacttcaagaaagccggcactacccctaagcgcaaaatggctgaattcaagggtatgcccgaagtgaatctcggcgacacgcttaccgtggaactcttctcggaagaggactgggtggacgtgaccgggatatcgaaaggtaaaggcttccaaggcgttgtgaagcgtcacggtttcggcggcgtgggcggacagacccacggtcagcacaaccgtcagcgcaaacccggttcgctgggcgcatcgtcctatccctcgcgcgtcttcaagggcaagcgcttgcccggccagatgggcggtgagcaggtcaaggttttgaacctgcgcgtattgaaagttattcctgagagcaaccttatcctcgtgaaaggttcgattccgggagcaaagggtgcttatttaacaattgagaagtagtatggaattagctgttttaaacacacaaggaaaagaaacgggtcgtaaggtagttctttcggacgccgtcttcggcgtggaggctaatgaccacgctatctacctcgacgtgaagcagtatcttgctgatcagcgtcagggcacgcacaagtcgaagcagcgcaacgaagtcgccggctcgacgcgcaagctcaagcgtcagaaaggcactggcggcgcccgttgcggcagcatcaagtctccgctgtttccgggcggcggccgtatcttcggtccccagccccgcgattacagcttcaagctcaacaagaagctcaagcagctcgctcgtcgcagcgctttgacctacaaggctcaggcaggtgcgatcagcgttgtggaaaccctctcgctggatgctcccaagaccaaggctgtcgtggctttggccgacgcactgaaagttgcagacaagaaagtgctgctggttctcccggagtccaacgccaatcttcagctttcgtgccgcaacctgccttacgtacagcccgtgctggctcagaacgtctgcacctacgacgtgatgaacgcatcggcgatcgtgatggtggaaggtgccgagaatgttttgaatacgatgttagcttaaaaacgcaagacacacaatggaaattattattaagccggttttgaccgaaaaaatgacgattcagggcgaaaagttgaatcgctacggttttatcgttgacgtgagggctaacaagctgcagattcgcaatgccgtagagcagatgtacaacgtcgtcgtgacaaatgtgaacaccgtgaactacatgggcaaactcaagagccgctttaccaaagccgggcttctggagggtcgcgctaacaacttcaagaaggctatcgtcaccttgaaggacggagataagatagatttttacagtaatatctaacgaagatggcagtaaaaaaattcaaacccgttactccgggtacaagacataagatcatcggtacgttcgacgaaatcacgacgaataagcctgagaaatcgttgctcagcccccagaagaattcgggcggacgcaacaattccggtaagatgacggtccgctatatcggcggcggtaacaagcagatgtatcgtaacatcgacttcaaacgcaccaaggacggcatcgctgcgactgtaaaaactatcgagtacgatcccaatcgtaccgcacgtattgcacttctggtatatgccgacggtgagaagagctacatcatcgcaccgaacggactccaagtggggcagaccgtggtaagcggcgcaggcgtcgctcccgaagtcggaaacacgctcttcctgagcgagattccgctgggtacggtcatccacaatatcgaactctaccccggtcagggagccgcgatggctcgctccgccggttcttacgcccagctgctggctcgtgagggcaaattcgccatcatcaagctgccttcgggcgagactcgtatggtactcgtaacttgccgcgctaccgtgggtgtcgtgtcgaacatcgaccacagcctcgaaagctccggtaaggctggtcgtgagcgttggctcggccgtcgtccgcgcaaccgcggcgtggtgatgaaccccgtcgatcacccgatgggtggtggcgaaggccgtgcgtcgggtggtcacccccgttcgcgcaagggtctcttggccaagggttacaagacgcgtaatcccaagaagacgacctcgaagtttattatttccaagaagaaaaaataattaaataagagtacataatgagccgttcattaaaaaaaggaccgtttatcgaccccaagctcgaagcgaaagtcgtcgctcaggccgaaggtaacaaaaagtcggtcatcaaaacttggtcgcgtgcaagtatgatctcgcctgacttcgtaggtcagacgatcgctgtccacaacggaaacaagtttattccggtgtatgtaacagagaatatggtaggacacaagctcggtgagtttgctcccacccgtaacttccgcggtcacgcaggtaacaagaaaaaataggtagaaaatgggtgcaagaaaagcaataaaagccgagaaaatcaaggctgagaagaagcagaaagcaatcgctgttctgcgtgattgcccgacctctccccgcaagatgcgcctcgtggccgacatcatccgcggcgtcgagatcaacaaggcattgggcatccttcgtttttcgaagaaggaggcgtcgatccgtatggagaaactgctcaagtcggctatcgccaactgggaagccaagaacgaaaacgaacgtctggaagacaccaagctgtgcgtgaaagaggtattcgtagacggaggccgcatgctgaagcgtattcaggcagcgcctcagggccgcgctcaccgcattcgcaaacgttcgaatcacgtgacgatcgtagttgataaaatggtaaccgtagaaaacaagtaatcagatgggacagaaagttaatccgatagcaaatcgtcttggtatcatccgcggttgggattccaactggttcggcggcaaagacttctccgagaagctggtcgaggacgccaagatccgcaaatacctgaatgtccgtctggccaaggcaagcatctcgaagatcatcatcgagcgcacgctgaaactggttacggtaaccatttccaccgcccgtccgggcatcatcatcggcaagggcggtcaggaggtcgacaagctcaaggaagagctgaagaagctcaccggcaaggagattcagatcaatatcttcgaggtaaagcgtcctgaggtggatgccgtcatcgtaggccagaacatcgcccgccagctggagggccgcgtatcgttccgccgcgccgtgaagacggccgtggcatcgaccatgcgcatgggcgccgagggtatcaagattcaggtttccggccgtgtaggcggtgccgagatggcccgcagcgaaaccatcaaggaggggcgtattccgctgcatacgttccgtgccgacgtggatttctgcctgaccgaggcgctcacgaaagtgggtattctgggtgtgaaggtttggatctgccaaggcatcgtgtacggcaagcgtgacctgttcgagattgcaggcgcatcggcgcaggctccttcgggggaccgtggcgagcgcggtgatcgcggagaccgtcgcggccgcggagaccgtcgcggaggacgcggcgaccgtggcgaccgcggtggtgaccgtcgtcgcaacaacaacaataagtaagtcggacctttttaaagcaaaacaacaatgttacagccgaaaaagaccaaatttagaagaatgcagaagggtcgtatgaaaggtatcgctcagagaggtaaccaacttgcatacggatcgttcgcaatcaaggcacttgaatcgacttggatcacaggtcgtcagatagaggcggcccgtcaggccatcacccgttacatgaagcgtgaaggtcagctctggatccgcatcttccccgataaacccatcacgaagaaacccgccgaggtgcgtatgggtaagggtaagggtaatcccgaaggattcgtggcgcccgttactcccggacgtattctcttcgaggcggaaggcgtgcccttggaaatcgcgcaggaggccctgcgtctgggtgcccagaaactgcctattaccaccaagtttatcgtacggcgtgactacgtcgaaaccacaatctaacgagacgacaagatgaaaagtgcagaaatcaaggatatttcgatcaaggacctgcaggagcgcatcgagaccgaaaaggcgcagctggcgaagctgaaggtgcagcacgcggtgtctcccgtcgagaacccttctatcattaagaaaaatcgcagagatatagctcgcatgctgacaatcctgcgtcaaaagaacgcctaataaggaataactatggaaagaaatcttagaaaagagcgtattggggtggttgtcagcaacaaaatggaaaagaccattgtggttgcggtcgcacgcaaagtgaagcatcccatttacggtaagttcgtcaacaagacgacgaagttcgtcgctgagagcctcgacgagacctgcaaggagggcgataccgtgcgcatcatggaaacccgcccgctgagcaagacgaagcgttggagattagtacaaatcattgaaagagctaagtaattatggtacagcaggaaagtagactcatagtagctgataacagcggtgcgaaggaagtcctctgcatccgggtgctcggcggcaccaagcgccgctacgcatctatcggtgataagattgtggtggctgtcaagagcgcgactccttcgggcgacgtcaagaagggcgccgtgtcgaaagcggttgtcgtaagaacgaccaaggaaatcagacgcgccaacggttcgtacattcgtttcgacgacaacgccgtggtgctgcttaacaaccagggtgaaatgcgcggtactcgtatattcggccccgtagctcgtgagctgcgcgaccagtatatgaagattatctccctcgcacccgaagtattgtaatcataaaaacaatttcggatatgtcagtgaaattacatattaagaaaggggatatggtccaagtcattgccggtgacaacaaaggccagcagggcaaagtcctgaaggtcgaggttacgaagcagcgtgccatcgtcgaaggcgtgaacctctgcaagaaggctaccaaacccaacgcgcagaatccccaaggcggcatcgtcgagaaagaagcggcgatccacatctcgaacttgcaggtgctcgaccccaaaagcggtaaacccacgaaggtcggtcgtaagctcaatgcaaaaggtaaattagtccgttacgctaaaaagtcaggggaggagatcaaataatggcatacgtacctacactcaagacacaatataaggagcggatcgaacccgcccttatgaaggagttcggttattcgagcgtcatgcagtgcccgaagctcacgaagatcgttatcaatcagggtatgggacaggctgtagccgataagaagcttatcgacgtggccgaggccgagctgacgcagatcacgggccagaaagccgtgcagacgcgttcgcgcaaggacatctccaacttcaagctgcgtaagggcatgcccatcggcgtgcgcgtgacgctgcgcgatacgaagatgtacgagttcttggagcgtctgatcgccgtggctctgccccgcatccgcgacttcaagggtatcaacgagaagttcgacggtcagggcaactacaccctcggcatcaccgagcagattatcttcccggagatcgacatcgacaagatcaccaagatcttcggtatggagattacgttcgttaccacggccaagaccgacgaggaggcttacgcgctgctccgcgaattcggccttcctttcaaaaacgctaaaaagaatcaataagctatggcaaaagagtcaatgaaggcacgcgaggtaaaacgcgtgaaactcgcaaaccgctatgcacacaagcgcgaggagattgctgccaagttgaagagcggtgagatcgaccacgaggaggcttgggttgcgctttcgaagctgccccgcaactcgaatccgatccgccagcacaaccgctgcaagatcacgggccgtcccaagggctatatccgcctgttcggcatcagccgtatccagttccgcgagatggcttcgaagggtctgatccccggcgttacgaaagcaagctggtaatattttcggatgccggatcatatccggtatccgaaaattcattttctgccgggaggcaatccgaagggggaggggagtagggctatgaaggctctaaggtaggctaagttcgtccgaagggagggacaaggtttgccggttaagctcatctgaaggagaaatcccggatacgagtccggattttgagggcgcaagcccgtggacggacggctgtcgctgagacggcccggcgtcggagaggggctttgcaggagggggaaacccggaatgcggagcgtgaacccggcgattgtgcgcaggccgatgaagcgtgccgcagtccgataccgcagagatcggggcttatatgggtgcagaacccgagtagttacgtcgcaatgtcgaggaaagtgccgccgcaagcggtaacttctcggcggcggggcggaaatcgaggggttaggcatttggttacaaatttctcggaccaaggggccggagagagaccgcgcagaatgcgtacggcacggcgtaacccgttgaatgactgggcggcgcgtgtggacgcggatgcggcgtgtcgggcgggcggaaagctgccgcagcgtcgtcggacggaatcttctcctgaaaaggcggacggttgtcgatgggaatttttgtacggggcatgttagcaacacctcagtgctaacattgtccgtattccggcatcggcacttaaaacgctgaaaataggctcgtaacttggttttttgagaaataatatgtatatttgcgcgctttatccccatgccgaacggcctgtcggagagcgcaaaagcgctgaacgagaggcgcaaaacgaaaaacatccgaagcggcggcgagtctgttgaaagattcaaggcgctgaggaccaaataattaactaattcattaatttttaacttctattcgttatgactgatcctattgcggactttctgaccagaattagaaacgcagtgaaagccaaccacaaggtggttgaagctcctggctcaaaaattaagcaggaaatcactaagattctttacgagcagggctacatcctcgcttacaaattcgacaccgacgagaaaggtcacccgtcgatcaaaatcgcccttaaatgggacgctgccaccaagggcaacgccatcaaggacctcaagcgcgtgagccgtccgggtctgcgccagtatgtgtcggtggccgacatgccccgcgtgctgaacggtctgggcatcgccgtgctctcgacttcgaaaggcatcatgaccgacgccaaggcccgtaaggaaaacgtgggcggcgaggtgctgtgctacatctactaacggaaatttttaaacaagaacaacaatgtcaagaattggtaaattacctgtaaacctgcccgccggcgttaccgtagaggtttcggccgacaatgtggtaagcgtgaaagggccactcgggacgctgagtcagaaagtggactcggacatcaaggtagaggtcggcacgcacaaggacatccacaccggaaacgaaattcccgccgtgctcgtatcgcgtcctaccaaccagccccgccaccgttcgctgcacggtctctaccgcgcgctgatcaacaacatggtcgtcggcgtatcgaagggctacgaaatcaaacaggagctcgtgggcgtcggtttcaaagccgaagtcaagggccagattctcgaaatgagtctcggttattcgcacgacacgcatttcatgcttcccaaggaggtgaccgctaccgccgtgacggagaagaagggcaacccgatcgtaacgctgaagagcatggacaagcagctcatcggccaagtcgccgccaagatccgttcgctgcgcaagccggagccgtacaagggcaagggtatcaagttcgtcggcgagcagttgcgtcgcaaggccggcaaatcagcaggtgctaaatagtaaatagtctagagttatgtcattgaacaagatagaaagaagagagaggatcaagatgcgtatccgcaagatcgtgagcggaaccgccgaacagcctcgcatgactgtatatcgtagcaacaagcagatctacgtgcagtttattgatgaccttgcaggtgtgaccatggctgcggcatcctcgctggacaaagaggtggcggaagccgccgccggcaagaacaagtgcgaagtagccgccctcgtgggcaaactggctgccgagcgcgctgccgccaaaggcatttcgtccgtagcgttcgaccgcaacggctacctgtatcacggaagagttaaacagctggccgaagcagcacgcgaaggcggtcttaaattctaagcgattatgtcaaataccaacataaagaaagtacgcactagcgatctcgagcttaaggacagactcgtaagcattcagcgtgttaccaaggtaaccaagggaggtcgtacattcagtttctcggccattgtcgtcgtcggtaacgaggacggcgtcgtaggctacggtctgggcaaggcttcggaggttcagtcggccatcgccaaaggcgtggaggacgcaaagaagaatcttgtgaagatccccgttatcaacggtacgattccccacaagcaggagctccgtttcggcggttcgctcgtcatgatccgcccggccgctcccggtacgggtatcatcgccggcggtgccatgcgtgccgtgctggagtcggtgggcgtgaagaacgtgctcgccaagagcaaaggttcgtcgaacccccacaacttggtgaaggctaccatcggcgctctctgcgagctgcgcgatgcgcacagcatcgcccgcctgcgcggtatctcgatggacaaggtgtttaacggttaatttcgtagagacaaatggcaagattgaaaatcacccaagtcaaaagccgcatcggcgcaaccgagcgtcagtgcaaaaacctcgacgcgctgggactgaagaggatcaacgcgagcgtcgagcacgacgactcggcgatcatcaaaggcatgatcgagcgtgtgaagcacctcgtcaaagtggaagaggtagccgtcaagaaggctgcagcgcccaaggctaagaaagccgaggctacggaggcagcagcagaataagtttaacagctaagaagtaattttacgatggaactcaataatctcaaacctgcaaagggttcaacgcaccacgacaaacgtatcggtcgcggtgccggttcgggtcacggtggcacggccacgcgtggtcacaagggtgcgcagtcgcgttcgggttactcgcgtaagctgggcttcgaaggcggtcagatgccgctccagcgtcgtctccccaagttcggtttcaccaacctgaagcgcgttgaattcaaggcgatcaacctctcgacccttgaggagctggccgccaagaaatcgctcgccgagatcacggtagacacgcttatcgccgcaggtttcatctcgtcgaaggacaaggtgaagatcctcggtaacggcgctgttaccaaggcgctgagcgtaaaggctcacgcattctcgaagagcgccgaagcggccatcacggccgcgggcggcagcgtcgaaaaactctaggaacccttagaaaccgaaaattatgaatcagtatctcgttgttggcgtcgtctttttagtggtaatcgctcttttggcgaccaacaagaaattggttgaaacgctcaagaatatctacaagatcgaggagctgcgcaaacgtgtgatctacacgatcgggctgctgctggtctaccgcttgggtagtttcgtagtgattccgggcatcaaccccaacgccttgggcgaggggtcggcttacgccagccagctggagggcaacggactgctgggtctgttgaacgtattctccggcggcgcattcggcaacgccgcgattcttgcgctcggagtcatgccgtacatcaccgcctccatcatcatccagctcatgggtatgatgatcccgtatttccagaaaatgcagaaggaaggtgagagcggccgccgcaagatgaaccagtggacgcgctttctgacgatcggcgtgctgatcctgcagggtccggcgtatatcgccaacctgtatcatcaggtccccactgcattcgtttacggcaactcgttcggcttcgttgcctatgcgacgacgatcctgatcgcgggtaccatgttcatcatgtggctcggcgagaagatcacggacaagggtatcggtaacggtatctcgctgataatcatgatcggcatcgtggcacgtctgccccatgcgctgttggccgaggtcaatgcgcgcttccagaccgccagcggcagcgctatcatgcttatcctcgaactggtgctcctgttcctcgtcttcatggcgacgatcgccctcgtgcaggctgtccgcaaggtccctgtacagtatgcaaagcgtatcgtcggtaacaaacagtacggcggcgtacgtcagtacattccgctgaagatgaatgccgcgaatgtgatgcctatcatcttcgcgcaggctctgatgtttattccggcgctgttctccgggacggctttcgcggctgccttcagttcgatgaccggcttctggtacaacttcacgcttgcagtgctggtaatcgcgttcacctacttctacaccgcgattatcatcaatcctcaaatgatggccgatgacatgaagcgaaacggcggctttattccgggtgtgaaaccgggtaagcagaccgtgaactacatcgacaccatcatgacgcgtatcacgctccccggttcgttcttccttgccatcgtggcgattctgcccgctctggcgatgaagttcttgggcatacagcaggcgttcgcctacttctacggaggtacgtcgctgctgattatggtcggcgtggtgctcgacactctgaagcagatcgagagctacctgctgatgcgccactacgatggtctgatgaagaccggacgtattcaggggcgtcattaggagttttccgaagagttcttagcgaagaatgatatatataaagacagacgaggagatagagctgctccgcgagaacaatatactggtgtcgaagacactggcggaggtgggtcgccacatccgtccgggtgtcaccaccaagtttttggactcgattgccgaggatttcatccgcgcgcacggagcagttcccgccttcctcggatatcagggatttcccgcttcgttgtgtgtatcggtaaacgaacaggtagttcacggtatcccatcctcgaaatgcgtcctcaaggagggcgacatcgtttcggtcgattgcggtacgtttatgaaggggtttgttggtgattcggcgtatacgttcgccgtcggagaggttgccgaggaagtacggcagcttatggaggtcaccaaagaggctctttataaaggtacggcgcaggctaaagccggcaaccgcgtaggcgacgtgtcggcagccgtgcaggagtatgccgaaagcttcggttacggcgtggtgcgggagttggagggacacggtttgggtcgcaagatgcacgaagaccccggtgttccgaactacggcgcccgcggcagaggaccgctcctcaaggagggaatggtcatctgcatcgaacccatgataaacatggggaccaaagcggtggttttcgaaagggatggctggacagtccgcacgcgcgaccacaaacccgcggcgcactacgagttcgccgtcgcggtccgaaaagacggtcccgacgtgctgacggactttagtatcatcgaacaggcaattaacaagtaagactctatggctaaacaggctgctattgaaagggacggcacgatcatcgaggccctgtccaacgcgatgttccgcgtcgagctggacaacggacacgtactcaccgcccatatctcagggaagatgcgtatgcattacatcaaaatccttcccggagataaagttaaagtggagatgacgccctacgatttgacgaagggacgtatatctttccggtacaaataacattagattgcttgaaaatcatgaaagtaaaagcatccatcaagaagagaagcgaggattgcaagattgtgaagcgtaaggggaaactctacgtcatttgcaagaagaatcccaagtttaaaatgcgccaagggtaatgtttaaacggtttattaaagaagaaaaagaatttatatggcacgtatagtcggtgtagatttaccaaaaaataagagaggcgagatcggcttgacctatatctacggtatcggtcgttcgacggctcgcaagattctcgaagtcgctggcatcagctacgacctcaaagtacaggactggtcggacgaccaggtcggcgcaatccgttcgacgattgccgacatgggcatcaaagtcgaaggcgaatgccgctcggccgtccagctcaacatcaagcgtctgatggatatcggctgctaccgcggcatccgtcaccgtctgggtcttcccgttcgcggtcagtcgaccaagaacaacgcccgcacccgcaagggacgcaagaagactgtcgcaaacaagaaaaaggcaacaaagtaatctttagagaattatggcaaagaaaactggaacagttaagaaaaaggttgttaaggtcggtgccgtgggtaacgcttacgtacactccactttcaacaacgtgatcatcaccatcaccaacgaggtgggtgacgtcatcagctggtcttcggccggtaagatgggtttccgtggttcgaagaagaatactccgtatgccgcacagaccgcttcggccgactgcgcgaaggtcgcttacgacatgggcctgcgcaaggtgaaagtgtatgtcaagggaccgggtgccggtcgcgaatcggccgtgcgcaccatccacggcgcaggtatcgaggtgatggagatcatcgacgttactccgctgccgcacaacggttgccgtgctcctaaccgccgccgcgtataatctgcgtcggggtaaggaatatttctaaggttttaaaaaagtcaaaacaatgggaaaatacataggaccaaaatcgaagatcgccagaaagttcggcgaagctatttacggtgcggacaaggtgctcgaaaagcgcaactttcctcccggacagcacggtctggcgcgtaagcgcaagaaagtgtcggagtacggcacgcagttgagcgaaaaacagaaagccaagtatacgtacggtctgctggagaagcagttcgcacgcacgtacgatcaggcggcccgtatgggcggcatcacgggcgagaacctgctgaagctgctcgaatgccgtctggacaacgttgtttaccgcttgggtatcgccccgacgcgtgcagctgcccgccagctcgtttcgcactgccatatttgtgtgaacggcaacgtcgtgaacattccttcgtactcgctgcgtgcgggtgacgtcgtgtcggttcgcgagaagtcgaagagtctggaagtgatttcggcatctctggccggcggttcgaagagccgctacgcttggcttgagtgggataacgcctcgatgagcggcaagttcctgcagaagcctgagcgcgaggagatccctgaaaacatcaaggagcagctcatcgtcgagttgtactcgaagtagtaatcaaacaaattcaaatatattatggcaatattagcattccagaaacctgaaaaggttattatgcttgaatccacttcatcgttcggaaagttcgagttccggccgctggagcccggattcggtatgactgtcggtaacgctttgcgtcgtattctgctctcttcgctggagggttacgcaatcacgactgtcaaggtagccggtgtcgaccacgagtttgccgctatccccggcgtgatggaggatatgttgaaaatcatcctcaatctgaagcaggttcgttttatccgcacagtcgataatcaggatgccgagaaggtctccattaacgttgcgggtgtgacggagctgactgccggatatatctcgaattacctctcgttcttcaaggtgttgaaccccgatctggtgatctgccacctcgcgcccggcacgaagatgcagatgacgctgaccatcggcaagggccgcggctacgtacccgccgaggagaatactcccgccgagtgcgagttcggaacgcttccgatcgactcgatcttcaccccgatcaagaacgtgaagtattccatcgaaaactatcgtgtcgagcagaagaccgactacgagaaattgaatttggaaattactaccgacgggtcgattcaccccaaggaggctctgaaagaggccgcgaagattctcatccagcacttcatgctcttctccgacgagaagatcaccgtcaacatggaagacaccaacggcgccgaagagttcgatgaggacgtactccacatgcgccagctgctgaagaccaagctctcggatcaggacctgagcgtccgcgccctgaactgtctgaaagccgccgacgtggacaccgtgggggacctcgtgaagctcaaccgcaacgacctgctgaagttccgcaacttcggcaagaagtctttgacggagcttgacgagctgctgacctcgctcaaccttaagttcggtatggacgtatcaatctacaaacttgacaaagattaattatgagacacaataagaattttaaccaccttggccgtcaggcgggacaccgtaaagcgttgatgtcgaatatggcttcgtcgctcatcctgcacaagcgtatcgagaccaccgttgccaaagccaaggccgttcgccagttcatcgaaccgctggtgaccaagtcgaaggacgacacgacgcactcgcgccgtatcgttttctcgtacctcaagcagaaagaggccgtaaccgagttgttccgcaccatcgcgccgaagatcgccgatcgtccgggcggttacacccgcatcctgaagaccggtttccgtctgggcgacgctgccgacatgtgcatcatcgagttcgtcgatttcaacgacgcttacacgctgggcatcgctcccgcagccgctgccgaggctaaacccaagacgcgccgttcgcgcaaacccgcagcgaagaagaccgacgctgtcgaggaggctaccgttgtcgagggcgaagccaagaaagccgcacccaagaaggccgctgctccgaaggctgcgaaaccggccgctcccaaagcggccaaggttgccgctccgaaggttgccaagaagaccaacgtgggcaagaaaatgtagttttccgtttaatcggaaaacgatcggaaaatccggataccccgatgtgaagtgcaccccaaatattggacggattagtatttgtttagatggcatgagttcggtattgtaccgggctcatgttgtttaagtatttctttatccgcttgttattgtagtagtcgatatattcttccaattcttttcggaaatggtctatggatgagaatttttgcaaatataataattcggacttcaataatccaaagaaactttccatagcagcgttatccagacagttacccttgcgcgacatgctctgtgtaatacctttctgtcttaaacggagctgatactgcttcatctgatactgccagccctggtcggaatgcaagacaatacccggagaatccggtattctggcaaacgcatcgtccagcatcttcatgatctgcataaagttagggcgttcagctattttatagctaataatctcccggttatataagtccataatcggcgatagatataactttacgccgcaaaccgaaaattccgtaaggtcagtaacccacttctgattcggtttttcggctgcaaagtcgcgttgcagaagattgggcgctatccgtccgatctgtcctttgtatgaacagtatttacggagcctgacctgactttttatcccgcaaatattcatcagcttaagtacggttttgtgatttatcgcatatccgatcttattcatttcaacggtaatgcgccgataaccataacgccccttatgttcgtgatataaccttataatactctctttttcgcgagcatatttatcgggttgttttgattttctgaagtgataataaaatgtgcttcgcgccatccctgcggctttgagcaatactgaaagccggcactgcggccttagtccttcgatggcttgggctctttcccgctctcgcggacaatgcgctcctcgactaaggcctgcaatttttttaagtaagcattctcggcacgaagatactccagttccttaagcaactcttcgtgcggagtcgttttgagtttgacttttttagtcttcgatttactcatggccggcctccttctttgcggtttacgccgcaggccttcagcaccttggttttgatagagccgctcccattgacgaataacaaaagggcccggaatgccgaaatgcactgctgtctccagcaaagatagatgattttggtgcatatgcttcaaaactgacaacttaaattctgcactgtagctaccgtggcgcagcttaaggccggcaaggccatggcgctcgaataatgttacccacaagtgaacttgcgagcggccacagcccaagtgacatccggcttccctaaccgaaagtccgccttcgagtaccagttttacggcctttaaacgaatctcataattatatttcataaaaaacaccccaaaagtgtccaacttttggggtgcagtacaatgggtgtccggatttttgtcgtttgtgcgggtgaatctgtcgtttatgcgaaggatttgtcgtttgtgtgaaaggatttgtcgttcggcggaaagattcgttgtcgtgcgggaggagtgcggcggatggtttgtccgttactcctgccggcgggcggaaactttgccggttcggagacattcccttgtcccttgtccgtccgtcgtccgtcgtccggctgccggggacctattggcggttcagcctatgggtgaaggccggatagacgaggcccgtgtaattcgctttggcggattcgatcgtggccgtcgtgccgtcgtaggtgtccgtgaaggagacttcgtagaggaagcagccgcggtaacggttgtttttcagcagttcgtaatagaactctccccagtcgatcagaccgccggtgtaaggctgcaaatgcttgtccagcgtgcccgattgcccttcggcgccgggattctgctggatgtgcagcgtgccgaggcgtgtgccgagctttcggagtatggcgacggcgtcgccgtttttggtgggattgatatacgacccgttcagcggaatcagggcgtggcccgtatcgaggcagacgcgcacctgctccagcccttcgccgctgagcagggcgagcgtcgtttcggcatcgtaagcgacgctccggggacagttttccacgcagagaatcgtgctcaggccgtacgtcgaattgcaggaagcgatgtgggtctgcaattcccggagcgatttccggctctgggccttgcgtgccgcgaagtcgcttccggtggtgagtatcgtgccggtcgaggggtggattacgaaatgcttgggcgacatgtgtttcatggcgctgtttatcacggttctgagttttgctacggccgtcgtgcgggccgcttcgtcggtcgccgagatgtcgtatgtcccatagggcagatggacgccccacaggtttgccgcggcggagccgattgccgctcccgcctcggaaaacagtgcgtcgagtttcgcgtcggtcattccttcggcgaagacggtggcgtcctgcgccatgatgtcgatgcacatgccggccgccgcggcgcgtttgcagttggtcgtgttgacctgtttgagcgtaatcagtttgcccggtttgagctgcagcagggagatgtcgtcgttcggggcgcccaacgccgtcgtcggttcgacgaccgtgatgctgccgttgccctcgcccgctcccggctccttgtcgtcggagcctccgcagttgcagaggagcgcgacggccagcagcggaagtatccgcgtttttttcattttgcaggaggttgattgtaaacgatcggcgggcgggggattgtccctccgcccgccggatcgtgtgaaagtgttcgtttagtttttcctgacgacgatgttgtccagacagatacggccgttggcgctggtagatcctgcacctgtcgtatcccagcatatctgggtttccgccgtcgcgccttcgatggttatcgagaaattggaccatttcttcaaggcctcgtttccgtgtttggggcagtgcgccgatgtgatattgatcgacttgccgccgctttccggagcgatcgatgcggccgaaccgctgccttcgacgaccacttgcgccgaagcgattgttccggcattcagtactttgacgggaatgtcgtgttccgatgcaaaccggacggcgtcgaatgtgacggtgacgatcgatgccgcggtcagttttgacagtttgggcgtggtcagcactccgtaatacatattcgaacccgaagccgaattggagagacggacatatcccggaaactcataacagtatttgatgccccaatccgttagtccccggtttgcgagataggccggtgccgcatccttgtcggaactgatgtttatgccgaacgtcgtgtaacttgcagtagccgtggcaggttcggtgccgtcgatggccgcaggactcgtggatgccagttttctgccgctgcttgccactttccccgtctggatccagtcgcctccgtataccatcagatcgaaatactgttccagaatgatcgacggatcttcgttctcgacgagtttcaggcgatagcgcggagtcttgtcggcgttggtgcagtcgatctcgacgtctattttgcaggtcgatcccgaaacattgacccagaatttatttatatcagcatcttcggtcttggccgtcatttgtccgagactttcccgcacgtagtatacggccgccgggtaggtgtagaacgggacggtcgcataaacgctgtttacggttccgatgccgccgttgccgctgtaagcggtgaacccgtaaggcgtgttctcaatcaggatggtgatgtcgtccgaggccttgcaggtgatcgcagcggtatagatgccggattccgactctttgagttcgtacaggcttccgtcggaagtccttgcccatacgccctccgaagtgtcgatcagctggaacggaagcgtaagctcctccgaatcctccgaatcgggcagttggcccttggcgtatatggtaaaggtgtttttcgcttccggatcgaatccgctcttggtgattttcaatacgtcggctccgacttcggtccattgcgtctcgtcgttgaatttgtaggcatagccgatggcgcctttgacggcttgccatgtgacgacgacctcgtctgcggattcgcctctggtgcatgacggggccggggtcggaagcgtcgggtcgatgtcgaaatcgacggtgcgttcggccgagtcggtcgtgtgttcctgattgccgacggcatagatgcggaacgtatgcgaaccgcgcgagagtcgggtcagcttcagggttgtggtcgctgcgtcgatggtcgtgtattcggtggagttgtccaaagcataggcatagccttccgcttttgcgacggcatcccatttgaaagaggctgtcgccaactcggtcgtaaccgcaagttttttggggctgaccagttcgatgctcatgatttcgtcgtccgacgattcgcacgaactcaggccgagcgccagaagcaggcaggggaataataataactttttcatataggttcggttcttagtctgtttttaataatccagatgatatatgccgggatgcgaatcggggtcggtgaagaccgtctgttcgtatttgttgccgaagcggtcgatcgcctcgacctttacgtccgcagcgggattcgtcagcgtgtaatagaacatgtgatccgtggacttgttgtagctgctgctgttgttcaggatgccgatgtgataggccaccgtccatgcgtccttgtccgaatattgggtcatggtgccggttttcgcgccgttttcatagacattgacggtccaagcggggtcccagttccagatgttcgcgacgatctggccggcgtttttcttcgagaagtagtacgaagcgtcgccgccgccggtgaatttgtcggaaccgcggtagagccggatctggaactcttcgtcgtgctgcaccgatttgtaggtccactccttcatcgcggccccgtcgatgcggtagatgccgaagccgatgggcgtgccttcggtgcagacggtcgagcgccaccatgcgccgcaggaggtgcccgtgatgtgctcgaagatctccttgccgttcttggtgtggatgtggttgatgttcgagtgggtgtgggccgacatgatcgttgcgtatttgtactgcgagagcagctccagcacttcgtcgtagtaggcgtaattgctgttgcggaagggaatgtgaacgcacaggatcaccattttatccttcggaacatagctcaggtcctgcttcagccattcgtattgctcggcgctgaaaccgccggtgtaacccgcgctctcctgacattcgtggatgatgttgtccatcgatacgatatgcacgtcgccgcggttgaacgaatagtccaccggaccgaagaagctttcgtatttcgcgcgggcctccttctcgttggccgtcgggaattcgtggtcgtggttgccgatggtcgagaatacggggattcccgtctgttcgggctgcagggccaccaccatgttgctgtagagcgcccatttgttgttcaccaagtcgccgaggtggatggcgtagcacgggatgtcggccgaggaggaatactcccggatgtccttggccgcttcgcgcttgaaccggacggcgtgcgccgcctcgttgatctgggggtcgccgatgcagatcagatcgaaccgggtttcgggagcgtccagcgccgtcagcgtgaagtcgtagcgggcggtttccggtttgagtttggtgaagaacttgggcagtttgtaggtcttgtgcatgttgaccttgtagcccgaaggcagggagtagaagacgaagcccgattccgcgttgcgggtcagcacatactggccctcggcgtcggtctgcgtgcaggtgaagccgtcgctgacgacaacccccggaacggggttgccgtttgcgcccgtgacatatccgtaggtgtcgccgccgtcgggaacgatctctccgccgtttccgccgttattgtcattgccgtcgctgtccgagcaggccgcgaaaaccgcgatcgagcagaagagaagcagcagtctgtatagccgttgtatcatagtgtgtttgtttttattgttattcctcgattgaatggccggcataaccggggttctgggttatcagcggattggcgatgcgctcgtcctccggaatgggccacagggcgtctttcatcgggtcgtaggacatcgtgatgaatctgcgcaggttcatatccttgccgtcgaacgtctggccattgtaagttacgtgccagtcggagtcgatcgtcggtacggcgttcgataccgaaccgtcgagagccggtgcgtagagcgttccggagatgaccgattcggccatatcccagcggcggatgtcgaaccagcggaaaccctcattgcagagttcgaccatacgctcgtagcgcagtgccgaacgcaggccgtcgcggctgaggttttcactgagaccgggcatgtgtgcgcggctgcggatcgtttcgatgtcggctttggcgacgctgaggtcgccgccgttccactcgatgttggcttcggcgcggatcagatagagctcggccagacgcatcagcggatagctcagcacgcataccgagctggtgccgaatgcattgttgtatttgtactcctgaatgtcgaggtatttgcgccacaagtaaccgcacgggcctttcgaaccgttggcgccgtattccgatttgctgccgtaggcttccgagtttgcgacgtctacgccttcttctttgtcattgtagttcttgatggtctgggcggaaggattggtctcgaactgcatgcccagtacgcgggaacccggacgtacgcagaagagatcgagacgcgggtcgcggttcttccacggattctggtaatcgaacaggggcgattccacgatcgacttgccgtccgtgcactggatggcgtcgaggaaagcctgcgtcgggctgaagtaggagcagccgcctgcgatacgcggcgccgcataatagccggcattgtgctggttgctggagattgccgtattgtactgcaaggcccaaatccattcgtcgctgttcttgtgaccgttgatgccgaacaggttggagggagtgggttcgcccttcgtgtggtcttcgccgcagtagcggatgtcgtatgcctgaagggaatatccgccctcttcggccagcttcagcgctttgtcggcataataggccgcctcttcgtaatatttccagttcagacagatgcgggctttgagtccgtaggcgcctgcgcgtcccagacgtgccgatccgtagctgttcttgttgtggcggatcggcagaaagtcgagcatttcgtccgcaagatcttcgttgagaatccgtgaaatcacctcctctttcggcgtgcgcgtgtaggtgtcgcccaatttcagggtgtggtcgatgtaggggatgtcgccgtaaagctggcagccccagtcgtagaggaaggagcggacgagcagcagctcggctttatacatattgtactcctgctcgctcatcagctcgcggacgttgtcgatgccgtccagtacgagattggcgcgggctgcggttttgtagatttgggtgtagaccttagtcacccatgcgttcgaaggcgggagtttcgactgctgctggtagttgtagttggcggcgttgatacgcgatgcgccgatgtcggaagcattgtcctgaatgccggggaacggcgtcgaggatgcgtcgatcagggtaaggcccttgtaggtcgcgaagacgcccgcttccacctccgatttcgtagccgggaacgtggacgcattcggaccgttgagatatgctttgtcgagcgagcagcccgtgatgaagagactgcagagcgctatgccggtgattattttgtttttcatggttgtaatgcgttaaaatttgagttcgagtccgaccgtaacgatctttacctgcggatagttgttcgccgagccgagtttcacgacgtcgaagtcgccgctcgaatcgcctccgtaacccacctcagggtcgtagccgtcccagaagttggtgaccgtgaagaggttctgcgcattgacgtaaagataggccgaattgagaccgatccggtgcatccacgacttgggcagttcgtagcccagctggatgttcttcagacggaggtaagcggcgcttttcatccagaacgacgagtcgtaccagttgtttttgttcgcactcgtcagacgcggagtcttgccgttgggattctctgcgctcgcccagtcgaggtgctccttgcggaacgtaccgccttggttgctgggcattacgtaataggtgttcagataaccgtccgttttgccgacgccttggaacagcagacccagacgcagccctttccagccgaagttcaggttcaggctgtaggtgtagcgggggatcgtgctgccgacgatgtctttgtcgttctcgtcgatcgagttgttgccgtcgatgtcggcatagcggatgtcgccgatctggacggtttccttgaactgcggacagttggcgttgacccagtcggcctcctcctgcgtgcggatgatgccgaggcttttcagcgcatagatgctgccgatggaataaccctcctgattgcgcagcacgccgctggtcgaggtcttgccgcgcatgtcgaggatttcgttcttgacgtcggacaggttggcctgcacgccgaacgagaagtcgcgccactggttgttgtaacctacgcttacctcccagcctgtgttgcggaccttacccgcattctggtagggagcgttgagaccgatgccgaggggcatgtcgagtttcatcagaatgtccttggtctccttgcggtaccagtcggccgtgatgttgagcttgttgaaaagcgagaaatccacgccgacgtcgagcatcgtggtggtttcccatttaatgtcggggttggccagcgtgttgagggtgacgagcgagtagatattgtcgttcatcgagatttgtcccatcgcgaggttctgcgtggtgggatagtagctggctgcgtcgccgccggcaaggttctggttgccgagcgtaccgtacgatgcgcggagtttcaatccgtcgattatgtgtttgacatcctgcatgaacggctcctcggagatacgccatgcacccgataccgaggggaagtagccccagcggttcgatttgttgaagcgcgacgatccgtcgatacgcaggttggcctccagcaggtagcgctccttgtagttgtagttcagacggccgaagtaggactgtatggcccactcgtaacggcggccggagttgtccatgttgtcgatttcgcctacgtcgatctgatcgtagttgtaattgaagacctgacggtaggccatcaggtatttatagtcgtacgtgttgcgctcggcgccgagaatcagtttcaggtcgtggccgctgaagttgtacttgagcgttgccagaaagttgtagttgccgtagaaagcgcgcgaacccgattcggtgagggtggcataggacgcggaggtcagcgtggaggtgcctttgtagtcctgataggttgtaacgggcttcttccagttgtggcggttggtggtcgtatagcgcggcgccagcataccctgcagggagagccattttgcaggctcgtaggtcagcgtgatggctcccgaaagccgtatggtgttggtgttgttgctgccgccgtaaagcatcagggctacggggttcatgccctgcattcccagaccgttgtaaagaccggtcgaaaattggttgggaatgtcggccggacgggtgttcatgtagttgaagatcgtgctctgatagggcgaggccttgcggtcgtcgttcgagaacgaaaggtcgagtttcatcgacagtttgtcgttgaacttgacgtcggcgttgttgcggaacgtgtaacgctggaagtccgcatttttgatgatgccttcctgatccacgtatcccagcgtggtgagcatgcgtacgcgctcgctgcccacgctgagcgaaacattgtggctgtgggtgaagcccgaaccggtcagcacggcgtcctgccagtccgtattgggataaagatccgggtccttgccccagtttttgcggtatagcgccatatcctcgtcgttgtaatcgggaatgggggtgctgcccggcttttcgccgttgaggtccacgccgtcgttgaggtacatggcgcgtgtcagctcgcggaattcgagcgcattgaccatgtcgggcaggtcggtcggcgactgccagcccacatagcccttgtaggtgatggagaaccgctccttcgaaccgcgcttggtggttacgaggatcacgccgttggcggcgcgcgaaccgtagatggaggaggacgcggcgtccttgaggatggagatggattcgatcaggttgggatcgacgctgtccagactgccttcgatgccgtcgatgagcaccagcggcgaggtcgagctgccgccgaaggagttgatgccgcggatgcggatcgcgccgccgtcatcgcccggtgcgcccgactgcgtggtgacggtgacgcccggagccatgccctgcagggcggccgaggtcgagacgatcgggcgtttgtcgaacgccttcgagtcgatggtggccaccgaacccgtcacgttcacctttttctgggtgccgtagcccacgacgatgacttcgtcgatctgcgcattgtcgctttcgagccggatgtcgtaatcggtcttggtggttacttcgaccgaagtctccttgtagccgatgtaggagacggagagccgctggccgggagccgccgcaatggcgaacttaccgtttgcatcggtcgtggtacccccccccggctgagtgcctgtaatgacgatcacggtagctcctacgagaggcatgccgtccgcgtcggtgactgttccgcggactgtcgtctgggcgtgcacggccacactcaggcagcatgcgatgaccgctgccaacagttttgttaaggtgcgtagctgttttttcatagttggtgaaattagtaaaattttaaggtctttggtcttgggataaaacaccacggggcagacgcgatgcgcctgtccgtcggaaggaatccgggttattggcccgaaaaggccggaaattcagggttcataatgcgatgtcgtttgtcttggttgtgtgtgcgggtgttttctctttgttgtctgaattatgggtgtagtttctttttgttgttgtaaggtattctttaggcgaaaggcgcgctcgaaagaaaatgcgcgtcggattatgcggaaattccgagtccgatacttattcggggcgatttccgtttgttgtataaaatataggtataaggccggcgcattgaaaaagggttgtcggaggttttcgccgcatgagcttcggagaaaccgcccggattacagcgaaatgcccggtccgccggatatgccgtccggaaaacggaacgtccgtttgcccggcaggcagaggatgaggtcatcgctgtaaagttagtcattatttgcttttatttgtttttcttatctttttcaggggtgaatttatatttatttttttgtatttgcaaaatttcttgttgaaaattttctttttgtagcaatattttaatatattcgcaaagtcaagtaagggattttgctctcttttacctttcgtttagcgacgatttgcactgaaaataagctataatggaacacctgtacgttattggaatagactacggcaccgactcggtgcgggcgctgctggccgatgcagagtccggcgaagggatcgccgtcgccgtttgtaattactcccgctggggccggggattgtactgcgacaccgcgaaatcgcagtttcgccagcacccgctggattatctggaggggctggagcaggtgctgcggcaggtcattgcgcagtgtcctgcgccggaggcgatacgcgccatcgccgtggatacgaccgccagcacgccgtgtctggtcgatcgcacctgcacgccgctgtcgctgacggcgggttatgaggagaatcccgatgcgatgttcgttttgtggaaggaccacacggcgcagcgggagtcggaggagatcaccgccctctgcgcccgcggcgaaatcaattacgcccgccgttcgggcaaccactattcgtcggagtgtttctggtcgaaggtcctgcacctgctgcggggttccgaacggctgcgccgcgatgcgtgggccgtcgtcgagctgtgcgactggattccggccgtgctgaccggctgccgcgctatggaggatttgcggtcggggctttgcgccgccgggtcgaaggtgatgtgggccgaagagtggggcggctatccgcccgaagagttcttcgccggactcgaccccgtcctgctgcctatcctgctgcctatcctgcggcgcctgcccgtcaggacgtacggctgcgacactcctgcaggtacgctcagccccgaatgggcggcgaaactggggctgtcggagcaggtggtcatcggagtggggaatgtcgattgccattcgggcgccgtcggcgcgggcatctgtcacgggaccgtggtgctgaatctgggcacgtcggcctgctacatggccgtcatgccgcccgaaaagatgggcgaccggatggtcgaaggtattttcggtcaggtggacggctcgatacttcccggcatggtcggattcgaagcgggcatgtcggccttcggcgacgtgtacgcgtggttcaagcgcctgctctgctggccgctgcgcgaagtgctgctgccggccgatcctgagaacgagacgctccgcgcactggccgcgcagaccgaagagcggttgctggccaaactggccgaagccgccgcgcagctgcccctgcgggccgatgcgccgctggcgaccgattatctgaacggccgccgttcgccctatccctgcaaccggctgaccggttcggtcgtggggctgaacctctcggcgaccgcaccggagctttattacgcctttgccgaggcgacggttttcgcgacgaaggccatactcgaccatctggcggagaacggcgtggagatcggacggctggtgggcatcggcggcatttcgcagaaatccccctttgtcatgcagctgctcgccgatgtgacgggcatggcgatcgaagtctccggcagcgcgcactcctgcgcgctcggcgccgtggtccatgcggccgccgccgcgggactctatccgtcggtcggtgcggcgcagcgggcgctctgtccgtccgtcgcccgtgtttacacgcccgacgccgcgaagtccggcatattggcgctccgctatgagcgttaccgcgccttgggcgctttcaccgagaacctttttataaaccgataagacaaaagaaacccgaatgaatttacttcaaaacccgaacaagcgtcgttggtatattgtggcgacgattttcgtcgcaatcatctgcaactacctcgaccgccagctgctgtcgatcctcaaacccgaaatcctgacccatttcggcatcgaagacctccagtacgcgtggatcgtcaacgtattcctgatctgttacgccatcatgtatcccatatcgggcattctggtggaccgcttcgggtcgaagaaggtgatgctgggtggtatcgtcgcatggtcgttggcctgcatcggcggcggcctttcgaccaacgtcgtcgaattcaccatctgccgcggcatcctcggactggccgagccgacgatcttcgccggacagatcgtggccgtcacgctctggttcgagaaacgccaccgcgccacggccaacagtctctgtacggcgggcggttcgctgggaacggtcatcgcgccgctggtcatcgcgtggatggcccggttcctgccgtggcacgacgtcttcatcgtggccggtctggtaggtctggtgatcgccgtggcatgggcgttgatctataagaatccgccgcaggaggtgctggccgtcacgatggcccccgacaaggacgaagtcgcgcggaacaacggcgaacagcagcgggccttcacgtggggcgagctgtggacgacgcgctcgctctggggcgtgctgctgatccgtctgatcagcgaccccgtctggtatttctgctgcttctggctgccgggatacctgcgcagcatgggcgaagcgcaggggctctcgcagcaggctacgctcgacatgattcagtatatcggcggactgccgttcctgttcggcgccgtcggcggcatcctcacctcggtctggtccgactggctcgtgcgccgcggcatgccggcgctgaaggcccgcaagacgatgatgatcctcatggccttcgtggcgccgctgtgcatcctcacgccctatgtgagcgagtggcaggccgtgtcgttcgatgcgcgcatcggacttgtggtggcgatcttcagcctgatcgcgatcatgtgcctgagctggctctacacgatctgcgtggtcatcgccgaggcattccccgtgaagaacgtcgccagcgtggtcggcatcacggccggcgcgggagccgtgggcggcgcggtgttcaacattttcatcggttcgctgctggcgacgatgggcaacgtgctgttcgccgtcatgggcgtgatgcacctcgtaacggccgttatcctgtggcgcatggtacgccacgaaactccgaaaaccgtaaaataaacctaaaacattgcaaatatggcaaatcagaaaacaacgattacggaaccccagcgggagattccggttcgcgccgaggtggacgtgctcgtcgtgggcggcggccctgcgggcatcatggccgcacgtgcggcggcaggcaagggcctgcgcgtcatgctgatcgaaagccgcggctatctgggcggcaacctgaccatcggtctgccgattctgggctacctcggacgcaagggcaaccagattatcaaaggactgccccagctcttcatcgaccgcctgcgtgcgcggggcgccgccggcgaacaccgtccctgcaagctccatgtgagcctgacgatcatcgaccccgaagaggcgaagaccgtggcgctggagatgctgcaggaggtcggcgtcgaagtgctgttgtacgtattctgcgccgacgtcgttaaaaacggcgatgccgtcgaaggcgtcgtcatcgagagcaaggcgggacgcgaggcgatcctcgccaagacggtcatcgactgtacgggcgacggcgacgtggcctgccgtgcgggcgtcgagtgccgcaagggcgatgccgacggcggcatgcagcctccgacgctgatgttctgcatgaagggcgtcgatgtgcagaagctgcgcgatgcgctggtcagccagcccgatgtcttcgacatggacaccatgcccgccgagcagttccggaccggaaaattcatcaccgtcggcctgcgcaaccagatccgcaaggccgaagaggcggggtataagattcccgtggcgcgtacgatcctcattaccggcatcaaggacgacgaaatctgggtgaacatgtcgcgcgtgagcggcgtcgattcgaccaagccggaaagctatacgcacggcgaggtggagggccgcaagcagatttacgagctggaacgctacctgaagaacttcgttcccggcttcgagaacgcatggcgcgagaaggtggctcccttcatgggcatccgcgaaagccgcgtgatcgtcggaaaatatatcctgacggccgaagatatcctcgcctgccgccgcttcgacgacgcggtcgccgtggccagctatccggtggatatccaccacgccacgggcggcgactgcacgctccattggtgcgaggactgctatgacattccctatcgttcgctcgtgcccgccgcggtcgagaacctgctggttgcgggccgctgctcgtcgatgaaccacgaagcgatggcttcgacgcgcgtgatgtccacctgcatggcgctgggcgaagccgccggacgtgcggcgcgcatcgcgctcgaagagggcgtacgcccctcggcggtcgatgtggagaaggtgcgggaagaactgcgccagaccggtgcatacctgcgttgatacggttttttggttagataatgtttaaaccgggtaagcctgtggcgggtcggattccgcccgctgcagcgcttgcttttaagacttgaaccgatgaagaagagctttatgctttgtctggcaggctgtcttgcggcctgcgttacggcggtctccgcaactgcggcgcgtccggcgtccgggcagccggtgacccgcatcatgacctgcaacgtccgcatcacgggactgcccgaagacgagaccgcaggacgccgctgggaggaccgccgcgaggtctgcctgaaggcgatccgcatgtacagacccgatgtgatctgcatgcaggaggtgatttacgattcgtataattatttcaaggagaaattctcggattatgtcgcttacggattcgcaggtccggagatggatccctataccgaaggttatcactttatcggcaagaacgtgattttcttcagcaaaaagcgttacgagttcgtctcgtcgggctgctactggctgtcggaaaccccgcttgccgcgggcagctgttcgtggaacacgatgcgcgcccgccactgcaactgggtgcgcctgcgcgaccggaagagcggcgcggagttccgcgtgctggacatccacctcgaccacaagtcggacgatgcgcggcgcgagcagatgaagatgatcgtcggggagtgcgcgcagtatgccgacggcttcccgcagatcatctgcggcgatttcaattcgggaatcgagaatgcacccgtcgcgtgcctgcgtgacgccgggtggcaggaggcgtacgaggccgtacatggtcccggcgaagccggctttacctaccacgggttcaaaggcccggattacaggaaaaagaacgcgcgccgcatcgactttatcttcgtgcgcggcaacctgcaacccgttgcggcggagattctccgcgacaaggtcgatggtctgtaccccagcgaccactactttctgatgtccgattttatcattcagtaaccgaacgaaaaacagatgagatttacaaaactattcgcggccgttctctgctccctcgcggcgctggccgcttcgggacagaacctccgggacgaaatagctgcaaatcccggcaagtccggcggcgtatattatgtctacacctacgacaatcccgtgctgacgcctgcgccgaagggttataagccgttttatatcagtcactacggccggcacggttcgcgctggctgctgcacgacagcgaatacgacgaggtgatggccgttttccgggccgccgacgccgcgaatgcgtttaccgagcggggacgcgaggtctacggccgggtgaagcgcgtctacgacgacggcatcgaccggggcggcgatctttcgcccctcggcgccgagcagcaccgggagatcgccgcgcgcatgtaccgcaatttccccgaagtattccgctccggcgcggtcgtcgatgcgcaggcgaccctcgtggtgcggtgcgtgctgagcatggcggctttctgcgagcggctcaaggagcttaatccccgtctggaggtgtcgcgcacggcgggccgcaggacgacgcgctacctcaatttctacagcaagccgaccaatccgacgctcagccgggagtacctcgacttcatcgacaagggcggttggcaggaggagtacgagcggatcggggatcggttcgtgcgtcccggccggctgatgtcggagctgttcgccgacggggagttcgtgcggacgatcgacgcgcagaagctgatgaagggccttttctatttcgccgccgacatgcagaacgtcggtctggggatttcgttttacgacctctttaccaccgacgagctttacgggctgaacgtgtacgacaactataagtattacgtgatccgcggcccttcgccgctcaacaggcgttttccgcagtattatgccaaggcgctgctggaggatttcctcacgcgcgccgaccgggccgtggagggcggcgcggtttcggccgacctgcggttcggccacgacggcaacctgatgacgttcgtgtcgctgctgcagttcgaggggtgcgacgtcgtggagagcgatcccgaaaagatcgcccaagcgtggcccttgtacaggattacgccgatggcggccaatatccagctggttttctaccgtaagaaagctgcggacgacgtgctggtgaaattcctctacaacgaacgcgaggtgcggattcccgtcgcaagcgatctggcgccttactaccgctggaacgacgtgcgcgacttctaccggaacgtaatggagaacctgcccgatccggccgcgaaatagcctgcgccgtttcggggcgggacgctccgggacgatatgaaaaaagctcttccattactggaagagctttttgtttgcggtcggggccgcttatttcgcaaagcctttgccgatgccgaggaagtcctccgccttgagggctgcgccgccgatcagaccgccgtccacgtcctcctttgcgaagatttccgccgcgttcgagggcttgcacgaaccgccgtacaggatcgccgtctcttcggctgctgcgccgaacttctcggccagcaccttgcggatgtaggcgtggatctcctgcgcctgctcggccgttgcggtcttgcccgtgccgatggcccaaacgggttcgtatgcgatcacgagctccttgtactgctcggcggtgaggttgtagacgacctcttcgatctgcgccttcaccacgtcgaagtgcttgccggcttcacgctcttcgaggttctcgcccacgcagtagatcggcgtcaggccgtttgcgtaagcctgcgccatcttcttgttgagcgtctcggaagtctcgccgtagtactggcggcgctccgagtggccgaggatcacgtacttgcagcccagcgccgcgatcatcgaagcggcgatctcgcccgtgtaggcgcctttggcttcggctgcgcagttctgcgcgccgagtgcgacgtccgaacccttgagcgcttcggcaaccgtcgagaggtgcgtaaacggagggcatacgatgaaattaacgcacgagcatacttcgccgcggcctgcgacgatgttcttggccagttctacaccttcggcgggaagcgtgttcatcttccagttgccggcaacaattttctttctcatattcggtttgtttttataagtaaaataaattttccaagcggaattattcctcgcaccattttttgacctcttcgatcgagggagccttcaggccgagtttgtttttcttgttgaagccgcacaagtcgttgaaaaacttgcccggagcgagctttttcagcgcttcgaccgtgatgtagcccattttctggatcacgggcacccactcttcgggaacgccgatctcggtgtatttctccaccggatcgctcacggctttcttttcggggcgcatctgcgggaagaacagcacgtcctgaatcgaagcctgatcggtcatgaacatcgtcagacggtcgatgccgatgcccatgcccgaacacgacggcatgccgtattccagtgcgcgcacgaagtccatgtcgatgaacatcgcttcgtcgtcgcccttttcgctcagctggagttgctcttggaagcgctccagctggtcgatcgggtcgttcagctcggagtaggcgttgcaaagctccttgccgttaacgaacagctcgaaacgctccgtcagttcggggttcgagcggtgacgcttgcacaggggcgacatttcgatcgggtagtccgtgacgaaggtcggctggacaagctcctcctcgcagtactggccgaagatggcgtcgatcagcttgcccttgcccatcgtcgcgtcggtctcgacgttcagacgcttgcaggcttcgcgcagctgctcctcgctctggccggtgatgtcgtagccggtcttttcgcggatggcgtcggtcatcgacaagcggcggaacggcgctttgaacgaaatctgcttgccgtcgagcgtcagctccgtcgtgccgtttacggccacggcgactttttcgagcatctgctcggtgaattccatcatccagaggtagtccttgtaggccacgtaaatctccatgacggtgaattcggggttgtgcgtgcggtccatgccttcgttgcggaagttcttgccgaactcgtagacgccgtcgaatccgccgacgatcagtttcttgaggtacagctcgctggcgatgcgcaggtactggtcgatgtcgagcgcattgtggtgcgtgatgaacggacgcgccgcggcgccgcccggaataggctggagaatcggggtttcgacctcgacgtagcctttcgagttgaagaactcgcgcatggtcgagatgattttggcgcgcttgacaaagacctcgcgtacctgcggattgaccgccagatcgacgtaacgctggcggtagcggacttcgggatcggtgaaggcgtcgaacgtctggccgtccttctccttgaccacgggcagcgggcggatcgacttcgagagcaccgtgaacttgcggcagtgcaccgacagctcgcccgtattggtatggaacgcgaagccttcgacgccgatgaagtcgccgatgtcgagcagtttcttgaacaccgtgttatacagcgtgggatcgccttcggggcagatgtcgtcgcggcggatgtagacctgaatgcggcccgtatggtcctgcaattcgaagaacgaagcgctgcccatgatgcggcgcgtcatgatgcggcctgcgatgcggacgtccccgtagttgcccttggtctcgtcgaagttttcggcgatctcccgcgccgtggccgtcacttcgtaacgggcggcggggtaggggtcgatgcccagctcgcgcagggctgcgagcgactgtctccggagctgttcctgttcactgagttcgatgctcatatcgtatgtttttgaatgttttgactgttaaccgtgcaaagttaataaattctgccgaaatacgaaccgggcgcggtatggaataaaaaggagccgcattttttgcggctctccgtattgtccgggatgtgtcgtccgggcgagttgtccgggggcattgggaagcgtcgtccgggacctgtcttccggagggttgtcgtccgggatgcgtcagccggcggcggaatcccggcggatcaggcggcggtaggcccgcagtgcggcgtatccgagcgcggcgccgaccagcgtgccccatacgaggtccatcgggaagtgtttgccgaggtagatgcgcgagtagcagatcaccaccgagcagacgaccatcagccccgtgaaccagcggcggcggatcgcgccgcaggcgagtacggccagcgcgacgatggtcgcggcgtgcgccgagacggtgccgtacatgccgctgacggcttcgggcgggacgtggaccgcccagtggcgggggactgcctcgcggcgcatgacgcgcagcgaatcgggcgtgatgtccagcccttcgagcgagggggtgaacatcgggcgcgggcgcggttcgaaatcaaggagcaggccgcccagcactccgttgctcttgaagatgcccgacaccatgtccgcgagtccgatcgccgccagcatcagcgccgtgaagatcagcatgccgcgccagccgctgtgccgccatatcagccagaggatcagggcgtagagcgggagccacatggcggtgcccgaaacggtgagcatcacgcggtccatagcggtgccgccgtcgaaattgagggcagagaaaaggtcgtggtcgaaggtatacatgggtcaatggatttgtcgtaaatggtcgcaagccgttttgggcgcattgccggaagcctctccggggagcggggccggacttgcagacacggccggcggccgtgggaggaacataccgggatgcaaggcggccgtcatacgcagtttaaaactgaaagtagatgaacggttgtatgtcgctcgacttgacctgcatcacgcaccagatcatcgccgccgccatgacgatctgcaggaccagcggtgcgtgcgacaccagccgctgcgcgaagcggtccgcgcgtccgggcatcaggtggagcaggaagcctgcggcgatcagggcgaaggcgcccgcatagccggagacgacctgcgggatcatcgcggcgttgaagttgtagaaaatctggtgaagcatcagctcgacggtctgcatcgactcggcgcggaacatcagccaccccagacagacgaggttgaacgtgaagaagatgccggccgcgcggctccaccagtgcatccggtcgcccgtggccttggcgcccggcacgaccgccatccagagcttgtgcagcgccagcgccgcgccgtgcagcgcgccccagaggatgaagcggacggcggcgccgtgccacagtccgcccagcagcatcgtgatgagcaggttgccgtaggtgcgcagtttgcctttgcggttgccgcccagcgaaatgtagaggtagtcgcgcagccatgtggagagcgagatatgccaccgccgccagaattcggtgatggtggccgacttgtagggggcgtcgaagttcttggggaaccggaatcccagcagcagggcgatgccgatggccatgtccgaatagcctgagaagtcgcagtagatttgcagggcgtagccgtagatgcccgccagacattcgaagcccgaatagagcagcggctcgtcgaagatgcggtcgacgaagttgagcgagatgtagtccgaaatgatcgccttcttgaacagacccgtcaggatcaggaagacgcccgtgccgaacatttcgcgcgtcacgacgatggggttctgccggatttgcgggatgaagtcccttgcgcggacgatcggcccggccaccagctgcgggaagaacgagaggtagaacaggtagtcgcaccagttgtcgagcggcttgagctgaccgcggtaaatgtctatggtatagctcatcgactggaagacgaagaacgagatgccgacgggcaggaagatgttctggaactgcatgaatccctgcccgaacatctggttggcgatgtcgatcaggaaattggtgtacttgaagtaggccagcatgccgaggttcaccgccacgctcagcaccacgagccaccgctttgcccgcgtcgagcgggcggcatggatgcctttggcgatccagtagtcgctcgtcgcggcgaagatcagcagcaggaagtagatgccgctcgacttgtagtagaagtagagcgaaaagaggatgacgtagacgatccgggccatcggggcacggcggaacatgctgtagacgagcatgaatccggcgaacagaaacaggaacagcccgctgctgaagatcagcggcgacgaggcgtcgtaggtgagcagcgcctgcagcttttccgggatgccgtccaatgcggggagtgtcatttcagcggtgcgttgagggtttccggcggaatgccggggatcaggtcgcgttcgatccgccggcgccgcaggctgtcgagcacggcctgctcggcctgccggcggatgcgtgcggcttccgcttccgtataggcccggttcgccccggcgttgagggcgtcgaagagcgaccacgccacgcgccggccgccggcataattgatgtgcgtgaagtccttgccggcccagccgttggcgacgaactgctccatgccgcccagcgaacgcatggcgtcgcaggtgggccagaaggccgctccggtgttttcggcggcgccccgctggtagccgagcatgtggggaatggcgtccatcggttcgaaaccggcgtcggtcttcaccgaacggtcgctgacgcccagcaccagcacggcggcggtcgggaagcactggcggacgtaagccaccatcttctcgatctggccggcgtagttggtgtagttgctcacgcccgtctgcatgatgttgagtccgtattgcaggatcacgaggtcgtaccccagcaggtcgttcatctgcgcattgaccgacgggttggtccagaacatcgcctgcccgttgttgctgcgcaccgagtagttgtccaccaccacgccgtcggcttcgaacaccgcgccgtagccgatgaatccctcgttgccggagagcaccttgaacgagagcgagcggacgtggggagccgtgacggcgatctggcgtatgttcggggcgccttcgaccgtgaattcacggcgcagcgagtcgttgagcgtcagctccacgcggctttcgccggggctgatgaagaagacccgcgccgcggtgcagctgtcgagccgcttgcggtagtcgctgttttcccagcgggtcgaagctccggccgcaggctggcagacccagcccgaaacgtagaagttctcgcgcaggttctgcggcgcggccttgcgctgcatgatgttgtaggaggtccagcctttcgactgggttttgatcgtgcggcggaacgccgtcaggggcgaggccatcggcgcgaagcccgcgcctccgccgccgtaagcctgctggagcctttcacgcaggtcggccgtgaggatgtcgccttcgatgaacgagtcgcccagcacggcgatgcgcaccggacgccgggcgcagagcagcgtgtcgtagaaagcccgcagacggctcgaatcgggcgtgccgaaatcctcgatctccaccagcgtcgggttcagccgggcgctgtcgggaacgaccggcatgcgccggacgctgtccggggcgagcgtccattcgaaggtgatctgtacggggcgcggtgcggaatcggcttcgatccgctccgcttcgatccgttcggcgacctgctccatatcgacgtggaaatcctcctcgtcgaagagcgcaggctcctcggccgcggcgaccgcgtcatcgaacgccacgaggtccgagagaatattggcccggcggagttttacgccgcccagactctgaggggggatgaaactgacggccgtcagcactgcgatcagcgccagcgccgcgatccatccccggtggatgcagtctttttcgggggtgttcatccgggaatcagtcgcgccgtccgaggattacgaagacccagtagagaaccgacgcgacggcgctcagtgcggctacgagataggtgcgtgcggcccagcccagcgcctctttcgcctgagcgagctgcgctccctgcatcgtgcggctgacctgcagccactccagcgcgcgggccgaggcgttgtactccacgggaagcgtgaccagcgagaagatcgccgacatggcgatcatgcctacgccgatccagcacagcagggcgttctgtgtggtggtcatgagcaccagtccgaggatgatgacccatgtggcggccgtcgaggagaactgcacgacgggcaccagctgcgagcggagcgtcagcggcgcgtagccttgtgcgtgctgcacggcgtgcccgcactcgtgggcggcgacggcggccgcggcgacgctggtcgaagagtagacgctgtcgctcaggttgacggtcatcgtctgcgggttgaagtggtcggtcaggtgtccgctgacatgcgtcaccttgacgttgtggatgtggttgtcgcgcagcatcttttcggccacctcggcgcccgtcagcccgccggggaactggactttggagtatttgcggaacaccgactgcaggcgcgcctgcacggcgtaaccggcgatgccgatcacgatgatcagtatgtacattccgatcatggctgcggagtagtggattccctgagaacccgaatccgcgtaatatcccgactgaagcagggtcaaaagcatgtgtgtcatagtctaacggttttttctgtatgtgtagtaagcgcccgcctgctgggagggcatcagtaccatttcattaacgttcatatgggccggtaattgtgcggcccatgcgatcgcttcggcgatgtcgtcgcccgtaagcggggtgacgccgtcgtaaacccggtcggcgcgctccttgtcgccgtggaagcgcacctcggaaaattcggtctcgaccatgccggggcggatctccgtcaccttgattccgcttgacagcaggtcggcgcgcatggactgcgaaatggcgtgcacggcgtgtttcgaggcgcagtagaccgcgccgttttcgtaggcttcggtgcccgcgatcgagccgatgttgaacacgtggccgccgcccgcggcgaccattttgggcgtaacgacccgcgtgacgtagagcagtcccttgacgttggtgtcgatcatggcgtcccagtcggccgtgtcgccttggtcgatgtgttccagcccggccgccagtccggcgttgttgatgagcaggtccacccgttcgagggggctcaggaatttgcggacctccgcttcgctgcgcacgtcgaagacgagcgcggtgcagcggccgcccgccgcttcgatttcgcggcggagcgtttcgagccgttcggcgcggcgtcccgtcgccgttatgtcgtatccttcggccgcgagccggagcgccgtggcgcgtccgatgcccgatgtggctcccgtgatcagtgcctgttttttcataaagtgggtttatgatgggcaaaaatacgaaattattgtgttactttgcataaattttccagcaaattaagcagccgtgaatctcgcctttttcatcgcccgccggacggcgcagcgcaccccggagaacaaacccggtgtgatggagcgtatcgccgtgatttccgtggcgttgagcgtcgcggtgatgctgctggcgatggccgtgatcatgggtttcaagcaggaggtgtcccgcaaggtggccgccttttcgggacatgccgtggtgaacggcgtgcggggcgtggggacgctcgattcggaccccgtgcgccgcagtgcccgcgccgaggagctgatccgcaccaccgaaggattcgtgtcgctggccccctatgccgtcaagggcggtatcgtccgtacggcggatgccgtgcagggggtgatgctcaagggcgtggacggggattacgactggtcgtcgttcggccagtggctggtggagggcgagctgccccgtgtgggcgattcggtgcgtacgaaagatatactgctgtcgcgcggcatggccgagaaactgatgctcggcgtgggcgacaaggtcgaaatgctcttcgtcgagaccggagacaggccccggcgcgaccgtttcaaggtggcgggaatctactcgtcgggaatggacgaaatggacgacgcggtgatcatgaccgacctgcgcaacgtgcagcggctggcggactggtcggacggcgagatatcgggctacgagattttcacctcggacttggccggagccgacgatttcgcccgcaggctcggacggaccctgctctacgacgatgccgacgatacggcgaacctcgccgtgagtagcgtgacggagctttatcccaatattttcgactggctgaaggcccatgacgtgaatgccgcggtgattatcggcatcatgctcgtggtggcgtttttcaacatgacttcggcgctgctgatcctcgtgctggaacgtacgcggatgatcggcctgctgaaggcgttcggcatgcgcaacgctacgctgcgggaggtgtttctttggcgggcggcgttcgtcacgctgcgcggactggcatggggcaacgccgcggggctggccgtgtgtctcgtgcagaaatatttccatgtcgtgaaactcagctccgagggctacctgctctccgaagtgcccgtcgcgctggggtggggctggtggctggcgctcaacgccggcgtcgtggcggcgatcgtcgcgctgctcgtggtgccggcctgcatagtatctaccgtaaaacccgacgaatcgatccgatacgaatgaaaccgtacaataccgaacagaccaagaaagaggaggtccgcgagatgttcgacaacatcgcgccgaagtacgacctgctgaaccatacgctctcgatgagcatcgaccgcatctggcgccgccgtgtggtgcgcatcgtgcgccgctgccgtccgcaccggatacttgacgtagcgaccggcacgggcgatctggcgatcgagatggcgcgccgcatccgcggcgtgcaggtgctgggcgtggatctttcggaggggatgctcgacgtggcgcgccgcaaggtgacggcgcgggggctcgacgggcgcgtcgtgctcgacgcgggggacgccgaacacctgcatgtggccgacgcatcggtggatgtggcgacggtggctttcggcgtgcgcaacttcggggatctggatgcggggctgcgcgaaatggcccgcacgataaagccgggcggcaaggtcgttgtactggagttctcgcggccccgcaaccggctgttcagggcgttgtacgaattctatacctataagatactgccccgcatcggcggcatggtgtcgaaggacaagcgggcttacgaatacctcccggcgtcggtcggggagtttccggcgccgaaggagttcatggcgatgatggagcgcgcggggttcagggagtgccgcgcccggagccagagtttcgggatcgcgcagatttacaccggacaaaagtgacgatgaacgcaaaacgcatacgaccgggcagtgcgccctcggataaccgcttctgccgccggattcgctcttcggaagaggacgcttcggcgggtcaggcccgttcctgttccgctgcggcgggcgggggcgcgtcggggagtccgctttgtcgccggtccggggctgcgggtggcgtttcgggctgcggccggactttggggcgcatgctgttctgcatactgctgctgggggtcgtattgccgttgggctcctgccgccggatggccgagaaggcgcagcgaaacatccggctcgaagcggtcgagaaggcccggcggcaggggttgtcgggggccgagatcgtattgcgcgtaaagaacggcacggggcacaagttgaaactggagaaggcgtcgctcaccgtttactatgcgggaggagtcgtgacgaaggtcgctctgcgcgagccggccgaggcgccccgtcgtgcgacggcgagcgtcacgacgctgtggcggatccggacttccgacccgatggcgctccatgtgatgaccaagaagatccgggaggacgatatttcgaagatcggcgtctcgttcgccgtcgaggggcgcggcggtcccgcgcgcgtaaaaatttcgcgggagatgatgccgttgtcggattttttgaatatctttgggctgtcgttgaacgacgtgaaaaactatctggaagagtaatgcgcagatcgctgaccatcctgctgattctttttgccgccgcggcttacacgcccctgcgcgcgcagtcgttggatgcgttcaaggagcggctggctgctcccgtggcgtccgacgccgcattcggcacggcaaaggtcaccgttacggagtacggggatgcggcgcgggccgtgaatgaagcttcgcgggcgggcgcccgcctgcgtttccccggttaccgggtctgcatcttcttcgacaacggtcaggacgcccgtgccggggccatcgccgccaagcagcttttcgaagagaactatccgggaatcaaggtctacatggtctacgagaatccctatttcaaggtcgcggtcggggactgtctcaccacggaagaggccatcattctcaagggcagggtgtcgtctgctttccccaaggctttcgtcaagaacgaaaccctctccattgccgaccttttgaactgaaaaacttcccttttcgaaagttttttagttttttatttgcatttatcctgctaatatctaactttgcggcgttacagaaaaactaataattaaacatttgacgttatgaaaaagattttctcttttgtcgtcgttatggctgccgtcgcaatggtaagctgctgcggtaattcgaacaaaaaggctgccgaaggcgaagctgccgccgctgccgctacgaccgaagccgctgcctgcacggagtgcaccgagaagtgcgactcgacggaggcttgctgcgccgagaagtgcgattcgaccaaagactgcgccgagaaagccgagggcgagtgctgcaacaaatagttcttgtcaggcattagagtgaaggagattcgaaagaatcccctttttttgtgtccgtatttccggtcgcgggggcggtgcggcgcgtctgtccgggcactgctgttttctgaaagccatggtccgagggccgaaagccatgggcatgagctgagtgtcgtgagtcgtgagccgtgagctgggatgccggagccgttgaaccggtgggcggcgtctgcggggctttgccgcggcggggccgtgcggagttctccggcgcggaatgtgcggtgtatagctgaaaaaatatatctttgcgaaaactcttgataccatgaaagtactgctgataaacggaagcccccatcgcgagggaaacacttttatagccctttccgaggtcgcgcggatcttggagtcggagggcgtgcaggccgagatcgtccatatcgggaccaaggccgtgcagggatgtatcgcctgcggaaaatgcgccgagctggggcattgcgtcttttcggacgcgctctatacgacggtgcgggagaaactcgccgatgccgacggaatcgtcgtcggttcgccggtctactatgccggtcccaacgggtcgctctgcgccctgctcgaccgtgtgttctattcctgcgggaaatatctcgcctacaagcccggcgcagcggtcgccgtatgccgccggggcggggcgagcgcgacgttcgaccggctgaacaaatactttacgattatgaacatgccggtcgttccgtcgcagtattggaacagcgtccacggacgtctgccgggcgaagcccgcgaggacgccgaggggctgcagacgatgcgcgtattggcccgcaacatggcccgcctgctgaaggcgggcgtcggtccggcgctggcgcccgaagccgaggagcggcagtggacgcattttatccggtagcggagcgcggccggacgcggtgcgccggattgagtgcgtcgcggatatgtacgaagggagcttggctccctttttttgtcgcacggacttcgtccggggtgcttccgcgctattgtccacgcatacagcggggtgcggaaaagcccgaaaaaatatcggccggaggggggcggttttatggaaaaaaacgataacttgccgccatgaaagagaccgtgctcgaaaaactcaaggtgctggccgaatcggccaaatacgacgtctcgtgcgcgtcgagcggcgttacgcgccggcatcgcgcgggcggtgtcggcagcacggcggggtggggcatatgtcactctttcacggccgacggccgctgcgtctcgctgctgaaaatcatgctcaccaacgtctgcatttacgactgcgcctactgcatcaaccggcgcagcaacgacattcggcgggcggctttcacgccggacgagctgaccgagctgaccatcgagttctaccggcgcaactacatcgaaggactgtttctctcgtcgggcgtcgtccgcaaccccgactataccatggaaaggatggtccgcgtggcgcgcgacctgcggacggtgcaccgtttcaacggctacatccacctgaaaagtattcccggcgccagtcccgaactggtggccgaggcggggcgttacgccgaccgcatgagcgtcaatatcgaaatcccgaccgaacgcaacctgttgctgctggctcccgacaagaactatgaaagcatctaccgcccgatgagttacatccagcagggggtgctgcagagcgccgaggagcgcggccgtttccgccatgcgccccgtttcgcccctgcggggcagagcacgcagatgatcgtcggggccaccgacgagagcgactgcgacattctgctgctttcgtcgtcgctctacgaccgtcccacgatgaagcgcgtctactattcggggtttattccggtgaatccctacgacaagcggctgcctgcgctggacaaagctccgctcgtgcgcgaaaaccggctttatcaggccgattggctgatgcggttctacggattccgggccgaggagatcgccgacgagcagacgccccggcttgatctggagatcgaccccaaactggcgtgggcgctgcggcatcccgaatttttcccggtcgatgtgaaccgcgcggactacgaggcgctgctgcgcgtgccgggcgtcggggtcaagtcggcgcggctgatcgtcagctcgcggcgttaccgcacgctgaccatgcagtcgctgcggcagatcggcgtggtgatgaagaaggcgcagtatttcgtccgctgccgcgagctgaccacggggcagggggtgaacgaactgcggccggagcaggtgcgccgtctgctgactgcgcctaagcggcagaaaccggataaaaacgaggggcagctgacccttttctgaatgcgatgttggtttttcgttatgataaatctttcgacgggctgctctcggcgctgttcgacgcctatgcgatgcgggcgttcccggagcagctgatcggtcccggagagccggaaccgctttttacggagcgcgtgcacgaggtcgcgaccgatccggcgcacgccgcccgtgtctggcgcggactggaacgcaggcttgtcgtccgggcgcgttcgatgctcgtctacgcatggcacggggagcaggagcggagcgatctgctgatgctgcgctgcatgcgccgggttttcgacgagggcggaggcgtgctggccgatcaggccgatcccgacatgaaggcgctgcaccggctggcgctcaaagtttcgcacgagtgcgagcggctcaggcagttcgtccggcttcagaaggctgccgacggcacctattttgcagccgccactcccgaacacgacgccctgccgctgtcgctggattactttacggaccgtttcgccgaccagcggtggcttatctacgaccggcggcgcgattacggatattattacgacgggcggacggcgcgccgggtgacgctcgaagacgaccgcggcatgatcgccgacaagctcgccgaccgttggctggccgaggacgaacggcagtttcagctgctctggaagaattatttccgggcgctggcgattccccagcggatcaacgagcgtcagcagcggcgcatgatgccccgccgttactggaagcatctgaccgaaatggagtgaacgggaggtgttggcgccggaaatgaaaaagtccgcagaaataatctgcggacttcggttttgcggggcttgcgtgtttcacgcctctggcggagaggaggggattcgaacccctgaaaccctttaggggtttactcgctttccaggcgggccagttcaaccactcctgcacctctccttgcggttcgcaaaggtaataattattttcagaatttaccaatgatcggcgattttccgctgccgaaaagataaattcggcccctccggcggcccggccgttttgccgggcgccgatccgcagccgttttcggaggggaatcctccccgtcgccgatttagaacggatagccgatggccaaatggaaaccgagtccgtccttgaagctggagatgttgtaatagcccgttttgtccggattcggatagggcgtgtgcaggccgattccgagatcggcgcggatgaccagatagctgatgtcgtaacgcagtccgaagcccgttcccagagcgatttcgttgagcagccctttccatttgagttcggcgccgggacgcttggggtcctttttcaacagccagatgttgcccgcgtcgaggaaaacagccccgttcagccgtcccatgatgccgaaacggtattcgacgttggcctccagcttgaagtcgccggtctggtccagatagccgttgcggtcgtctgcgggcgggcggtagctgcccggacccagcgaccggatcgtgaaggcccggatgctgttggctccgccgatatagaactgttcgctgtagggcatcacttcggagttgccgtaggcgtatcccactccgacgagaaaacgggtggccagccagttgttgcggcgtccgatgcggtggtagaacttcacttcgctcacctccttgacgaactgcgagaagcggttgccgaacaaatgctgcggctgtttgctgccgaacaggctcaggacgcccgaaaggatgtttccggccgaggtgacgctgttctgccagtagaaacggcggttgccggtgcggccgtaggttttgtcgaaggtgtaggtgtagttgatcgacggaacgaactggttgcggaaactcatggcgatcgccggattctcgtccatcgtcttgtcgaaagcttcggtcgtgtgcagcagtttgttgtaggtcagcttgaatacggtcagcgaatggcggctgtagggcgaagtctggaaattgtagcccgccgagccgctgaaggcgatcagccggaagaagctggggcggttcatcaggtccacgcccagctggaacgtcgtgctgccggggtatctcagcctgcgcgttgcgaacgacggcagcagcagccgcggaatgttgaggttggcgttcagccccagttcgtaggagttgagccgcgacgaacggcccccggagttcttgttgcccgtctgccattcgtacgagccgttcagcttcacggcgagcacctcgccgccccggaagaggttgttgttgctgaccttgaaggtgatgcccggaccgatgaagctgttcgacttggaggttacgtcggtctccagcgccgcttccagcggatagtcgaactgggcgtcgatgaccacgtccagcgtgtcggcgccccgcagcgagtcgagcggcgtgacgcccagattgaccgagcggaaaatgcccagtttgttgagggcggtctgcgtgcggttctgagcgtccacggtgaagagctggccgggttcgagcgagagcgtccgagagagtatcttcgggcgtattttcatcggcctttgggcgatgacccgcacgtcccgcaggcggaacgtatcggccggaccgggtttgatgttggtgaggcggaccgtgatgtcgcccacgcggtagggtttgagggccacctccgggacgttcggtttgaggttcagccgcaggtcgacccgtcgccgttcgacggtcgtgtcggcgaggtattccatgtattcgggccggaaataataatagcccctgttgcgcagcagctgtgatatgcgcttgcgttcgagcgtcagcgagtccatgttgtactgcgccccgacccgcagcagggaggtcgcccgcatgctgtcgatcaggggctgcaggccgcccccggcctgcgggtaggagatgttcgagtagtaccacggcggcgcgatgcggagcgtataatagaccttggcctttctgccgtgcttgcggtagagcagggagtcttcggcttgggagccgaaataaccgtagttttcgagcacctgctcggcgactttggtccgcagtccgggctgtaccttggagatcagcacgggctgtttggccagccgcttgtagagccagtatttgaatcccttctccttcggcgtgtagaggtagttgtagacccaaaggccgatcggcagcggcgtgcggagataggggctgtaaagcgggttgttcggggccacggagagcggctccttcacggccgattcggccgctgcggagagcacgacgcccgaatcgggttcgatccggatcttcctaactcccgtgtacaggacttcgtccgttcccagacgccgggtcgtggaacaggccgccgcgagcagtgcggcgcagaggagtatgcagctatttctgacgcgcatcggactcgtttcgtttttgtttttccttttccgctttgggacgcatcggtttgaacaggtcgcccagccggagcagtttcttccggatgacgaagcccacgcccgtctcggtgatctcgccttcgaggatgctttcgtagccggtgtggcggaagaccttcagatacatgttgtcgcgtttggtcagcatgtattcgagcgaaatgtcgtcgatcaggttctccttcaggttctgcgacggggcggcgtcggtgctgaacttgcccccgatgacggcgcgcacgcggttgctgaagagacttttggacagccggtacgaataatcggtccgctggccgttcgggtcgtcctcgccgtaggagtcgatgccgaagctgaggtccacgcccttcaggttgttctgcgcccactggttcagctctttctgtatgaacgagttgagcgggttctcggtgctgaccttggcggtcgttcccggaccggtgtaggtgttgtagatgagcaggttcatcgcctgattggcccgctgttcggccgtcagcgaattgagctggttctgcatcgtgaggtcttcgggggcggacagtccgaagctgacttcgaggtcgttcagcgtattgcggatattgatggagatgttgaaattcaccgagcgcgaatcctgcccgtccgcggagacgctggcccggacggtttcgaccgccgtaatgttgaaggccgggtcggcgacgtttccgacccagtctacatagctgtccggcgtgatcttgaatatcttctgggagatcacgggcggattgtagcgcaccgtcccgcccgaaaggacgtatttgcccgacaggctgacgtctcccagcggattcatcgtgaaggtcaggttgccgccgccttgcaggtctatccggttgctgccgtcggcggagaggtccacggcggcttggacgtcgtcgttgatgtcgacgttcaggaggatgtccataccgccgatccgcaccgtcggggtggcctcggcgaagctttggttgtccatgtcgcggaacgaaacgaaggtcacgatgttctgcggacgctccttcacgtccatcggcgagtcctgcatgacatagttgatgtcggtgtttttgagcagtgcgacgctgccgcggacgacgagttcgtccagagggcctttggccgtcgcgtccagatcgagataggctttcccgtagacgtccgttccctccttccgggccacgttcacgaactggaaatccgacgcccgcagcgcgatgtcggccgttatgcggccgaagtcggtcagatcgacgtagcctccgatcgtcagcgggcttttgttgggggcggtgaccgcaaagtcgtcgaacaggacccggctgtcgtcgatgcggatcgtgtcggaagagagacggaacgaagtgccgatcatcggcacgcggacctccgtctgtgcgaactgcagaccgccgttcaactgcagccgttgcggcgttccgcccgcgtggagcttcccggagaggatgccggagagacggagcatgtcggcgggcagaaagacgtcggcccgctgcagggggaatccggggatcgacgccgtgaggtcgagcgggctttcccgctctttgcggtagtcgccccgcgcggtcaggacgtcggcgccgtccagcgtgagccgcacgtcggcctgctgttcccgcccttgtgcatagcgtacgcccagcccgacgtcaccgaagcgctgcttgtcgtacgagagtccggcgactgaaacgtcgccccggacagccagcgagtcggcgcccgtgttcagggtcacggcggcgcccagcacgccgccgacgggcggggcggaggggagcatcgccagcgctccgccgatgttcagccctgcgatgtcgagccggatgccgcggagcgagtcggtttccggaacggtatggatcgcaaaccgctggtcgccgtgagtcatgtcgaggtcggcgctcaggtttccgtcgaaccggtagacgaggtaattgccgggattcactgtccacggctcggagccgaataccggggcgaggggcgttacggacgcacggatcaggctgtcgttccacgctgcgtccaccccgaagcggaatccttcccggcctgcgcggttcttttggtagaaattcaccgctcccgtgttccgtacgacgtggccgtacactcccgcgagggctatgttgtccagatttccgggggcgttcgccacgcggagggcatattccagccggctcccgttctgcaccgcggacgccgtcagggtgtcgagaacgatgctgccgtaagccagtttttccacgcgcatccggagcgatacgggcagggagtcgcagttcgtgccggcgatgtcgagggagctgaaagcgattcttttggttctcaggaaactgctgaggatgttgtcgcgtcctgccgagacccgcagtccgaaatcgggcaggaccgttttgagcgaatccatatcgacgtgttgcgagcggatctgctgcgccagcaccccggcgctccgggacgcggcggcggtcagcgaatcgagcggttcgggggcggcgaacgagagcgtcagatcgccggaggtcagtccggcgcgggtggctgtggtgtcggtgccgaacgtgacgtttgtccggcggatgcggtccgtgcggtttttgctgcggattacgatgctgtccagcgtgagacgtgcggccatgccgccggcatccgaagcggaagcgtcggcgtcgagcgcaaacgatccgccgatctgctccggggtgattcccatgtcggccagatcgaagtcgaagacattgcccgacacgccgatccgctgttcccgctccgtcagcgttcccgaaacggacagcagcagacggagcgcttcgtcgcggtcggaaagacggccggagaggtgctggttttcgaggtccgcatccagctctattccgccgaaatcgtggctccggtactccgcgcggccgatccgcatccggacgcttccccgtgtctgcggcagcaacggatcgaatccggcgcccccggccgtcagcgtgaaatccagtgcgcccagcgagtcggccggaaggaaccggttcagcggaaggctgtcgcatcggacttccgcatcgtatatctgtttttccgggtcgatccggccgttcagcgtcagctggccgccgtcggcgttcagcgtcgaggcgagcgagtaaagtccccggtccgcgtccgccgctccgcggagcgtgatccgttcgggaatcgtcacgcgccgccgcagggccgtgtcgggcagcatctccagcagaaaagccatgtcgcggaactccccttcgaaacgggccgcggcttccagccgctccggggcgagcaggtttttcgcggtgccgttcaccgcaaggtcgatatgtccgggcgacgagatgtccagccccgcctttttgatgtcgcccagcgttcccgccgccgaaagcttgatccggacgatccggtcgtccagcgcggcgggaatcaattgcggatagagcagttttatctcctccgtattcaggctcgccgagaggtcggcggtcagcggggtgtcgggcgccattcgcatgattccggctccggcgtgcgcctcggcccggacgccggaaagcggcgtcgcaagttcgaacccggagagcgaaatgccggtggagtccattgcgaacgctccggcggcattccgtacggacaacccgctgcgctcggtaaacgccagccggcggatccgaagggcgatgtcggcgccccggttgtagatcgaatcgaccgacaggtcgagcggcgagaggacgatgaacgccggatcgaatcccgccgcggggcggtggtgcagcgttccgtattcgaggctgttgtcgttcagcgcgacgctgccgacccggacggtccacggcagggcgggagcttcgccgtcgtcggccgctgcgtcgtggggtgatgatgcgttgtctgcggccgctgttttatcggggtgcgccgctttgccctgagtcgctgttttgtcggagggcgccgctttgctccgggccgtcgttttgttcgaggccgttctcttgtccggaacagccgtcttgtccggagccttttctccggcgtccgccggggccgtcaggtaggcgtatccgcccctgttcagcaggatgcttttcacggatgcctgccggctgtccagcagaacccggcagctatccacctccccgtccggcagccggacggagaggtcggttgccgctggggcggtccgcatcccgaagacgaggtttgcgaccgtcagtttcccgacgtcgatctgccacggcagggccgcggcgctgtccgccttttcggcgggagcgctctccgccgtattcagaaatacatccccgtcagtcagcgcgatacgggaaatgccgaccgttttggccggcaggccgacccggcagtcgttcacggcgaactgtccggcggcgaccttcaggtccatgcctgccgtggaatctctgtaatgcgccgcgagttttgccagttcgagactccgcacggcgacctctttgcggagcaggggccacacggcgacatccagcgaaaggtgtccgcaggagaggagcgtgtcgcccttgtcggtcagcagcgtattgtccacggacagccgcagcgggaaggagagccgcagacgctccaccgacaggtccattccgagcgtccgggatgcgtagccgacagccttgccccggacgaaatcctgaacggccgggatgtagagcagggcggggaccagcatcaggacgaggaggatgacgagcagcgtccggaacgtatatttcagtatctttttcagcatttgcagagtgactgattccgtgtttgtcaggcggcgacgcgtctgcgtgcgattgtccggccggtgcgcggggcctgcgaaatttcgcgcaaattactaaaaacccgatgatcgggcaagggcttcgctccccataaacggtctctttttaaacaattatcgtcttttcccttcccgtgttgccgccggtcgtgcgaaaagtcgtttaaacgttccgggcggattccccgaaatcgaatcgcagctgcacgcactcggtgcaggcttcgggcgaattgccgaccgtaaggccgatcaggcggatcttccgtccgcggaaatcgaccgccgccagcagctcctcggacacctgcctgagcgtttcggccgaattgacgggagcgaaaagcgtcttcgaccgggttatctggcggaaattgtcgaacttgagtttcagcacgacggtctttcccttgaattcgtgccgcatcaggcggttccagacctcttcgcgcacggccgacagctccagccgcagctgttcccggtcgtcggtatcttcggcgaaggtcgtctccgcgccgagcgatttgcggatgcggttcggcgtgacctcgcgttcgtcgatgccgcgggcatagccgtaatagctgtgtccggccttgccgaaatggcggaccagctccgcttcgtcccgcagcctgaggtcggcgcccgtatggattcccatgccgtgcatcttccgggccgtcacctccccgatgccgaagaaccgctcgatgggaagggccgcgacgaactcttcgatctgtccgggcgggatcgtgaacagtccgtcgggtttccggtagtccgaagcgatcttggccagcatcttgttgaccgatattccggccgatgcggtcagtccggtttcggcgaggatgcgggctttgatctcgcgggcggcgagggtcgccgagcgcaggtgcgtcacgtcgaggaacgcctcgtcgagcgaaagaggctcgacgagttcggtgtagtcgcggaagacggcgcggatctgccgcgacacctccttgtagacgtcgaaacgcgccggcacgaagatcaggttcggacagagccgtttcgccagcgcggaggatatcgccgaacgcaccccgtagggccgggcttcgtagctggccgtggcgacgacgccccgcgggccgtcatggccgacggcgatcggccggccccggtattcggggcggtcccgctgttcgacggaggcgtagaacgcatccatgtcgatgtgtatgattttccgttgcgtcatggtggtgattcctgcaaagatagtgaataaatgccgctctttcgtccggtgattttgcgtatctttgtctccggattaattctgaagaaaatggcggacgactatttaggacggaaaatggaagagtatctggcccggacggcatcggggccgcgcaatcgcaggccgttggcgacgctgggcaggctactgctcaaaaaccggagccatcgcggttacgacgcgcggttcgtcgtgcgcggggatcagctccggcgcattatcggcgtgaatgccaaaatcccctcggcgcggaatcagcaggtgctgcgcttccggcccgtactggcggacgaggctcccaaagtattgccccatatccggctgggaggggctttgcccgaacttcatctgcccctgccggggaccgagccgaacgctttcatcatcatctgctcgacggtcgccgaggaccgctatgtcgatatcgatctgggcatttcagcccagagcatgctgttgcaggcggtcgaaatcgggttgaacggcatctgcatcggagcgttcgacaaggagccgatcaggcgggagttcggactggatgcggagccgctgctgattctcgcactcggcaagggcatcgagaagatcgagctgacggagatcggctccgacggcgaccgcgcctattaccggaaaaacgggacgcactatgtccccaaagtccgtctggaggatctgctgatcggatgatgcgccctctttccgcgtcgggcgggtggccgtgcggcagcttaaagctccgtgccgttggccgcgaggatgccggcgttgagataggtggcgaagagtatccagcagaggtacggaacgaagagccacgccgctccggcccggattttcccgctctgcgcaatgtaggcggcgacgagaatgtcgagcagcgcgatgtcgatcattcccagcagggggcttcggcatacgaagaagaggatgctccacagcacgttgaatcccagctgtgcgaaccatagcgccataaccctccggcgcaagggcgagacggaggtcagaaccagtccggcggagaggcccatgcagaggtagatgatgctccatgcgatgggaaatgccgcattgggcggcgtcagcgcaggttttaccagatgcggataccattcgcggatcgcgtcgttctgccaccatccgaccagccctcccaatacgaagcagagcagtgtgggaagaatataagcccaagcctttttcatcgttcagccgtttctgattgtgtgtgcaaaatcggtgcccgccctgttgccggacgatccggcggcgtgaatcccctgcaggtctgccggacggtcggcggataaaagacgggactgcctgaacccggtcagacagtcccttgcgacactctatcgaaagacgaactgcgtcgttagcagttgccctgcgattttttggtgtactggttgtgtccttcgggattgttgctgcgcgatacgcggcccgtggcggacgactggcttttggcggttcctcggctcgtcgagctggcgtgcgaggtggtcgtgcgggacgacttggtcgccgatttgttttgtccggtctgcgtgcggccggcggtcttgttggttgactctttcatgactgataaagaatttagtttgacattgtgctgtcgttcgtgccgaaaaaacctttcggccgaaagcaagtttgtaacgccgcactgttgacgcaatatgcggcgttgctcggaaagaatacaaaacgtataccattccggcccggcaggccgttctttcggctgtttcggcctataggggacgcattattttttgacccagacggccagttttcctccgtgtaccctgaagagggccttgccgtcgtctccgatgactatttcgtcgtcgtagcttcccgtgatctcgtgccacgtctcattggcatgcgttacgcctacggacatcaccttttcgccgtcttcgccgttggagagcagcagcgcaagtcccgaatccggatgctgctcgtcgcctgcgcgggtgaaccccacggtgttgggatggtcgaagtagtcggtctgctcgccgaaagcccgcgagcggcgtgcgtcgagcagtatgtcgagaacggcccggtggggcgacgcttcgcccttcatgctgtaatagtcgccgtagaagatgcaggggtacccctccttcatcagcaggatcaggccgtacgccagcggcttgaaccacgacttgacctgcgattcgagcgaactgccgcgctgcgagtcgtggttgtccacgaacgtcacggcgagcgtgggatgtttccgcacgagggtgtcgtcgagcagcgtccgcaggtcgaaatcgcgcccctgctgcgaagcggtgaagagtttgaagtgaagcggcgcatcgaacaggtcgatctggtggtccacggcgtcgaggtaggcttccagcgactcgaaatcgccgctccagtattcgccgacggcgtagaactccttgccgcgcgaagcccggacgctgtgcatgaattcgccgataaaggtgttgcggatgtgtttgagcgcatcgagacgcatgccgtcggcatcgagcgtttgggcgatccatgcgccccagcgtttcatctcctcgatcacttcgggatggtcgaaatccacgtcgttgaagatcaggaagtcgtaattcccgttctcgccgtctaccccttcgctccacttcttgccttcgccttggatgaggtagatggcccgcttgccggtctcgtaaacctgatcggttccggagaagtggtaccagtgccatttgaagggggagtacttgtcgccgcgccccggaaaggtatatccggtccagccttcgacttcgacgggggcgccgatcacctgctcgcggttttcgggatcgacttcgcaggccatgaacttctcggtgtagtcggcgccggttttctggttcatcaccgtgtcgatatagaccgaaatcccgttggcgtgcagcgccgcgatcgcctcctccagctcttgtcgcgtgccgtacttggtgcggacggtgcctttctggtcgaactcgcccagatcgtagaggtcgtagacggcgtatccctcgtcctgctgttcgtcggctttgtaggccggcgggatccagaccgaggtgacgccgacgtcgtgcaggtgtcgggcgtcctctttcaactgcgtccacaatttaccgtcattgggcagattccattcgaaatactgcatcattactccgtttttcataaatatatgtatttgatgtttgcggtattttgctgcaaagcgcatgcaaaacaggaagaacgctccggctgaaattccggagcgttcacacccagcgggccgacgggatatttagtcctgttcgaccggctggcggcgggacgccttggtgtcttgcggttcgtactcgcaccaccggaggttcttctccggcgtcgccttgcggatttcgccgctgcgctccttgctgagtttcttgtccgcactgcgcaccgaagcttcggtgcggggtgttccctgcggtttgagctgcgtgagtccgtcggtttcgagcacctgctcgcgcgggtcctcgacatagagccactcttcgcccagtccggtgctttcgccctcgttccacgggccgcgggcatcctctcccgtcgaatgattggagtagatgttgctgtagcggggatcgctctggagcactcccggcgggaagttgggctggatggtccccagcgccgcttcgaactgctggaagtgcgccacttcgcgtgtcatcaggaagttgagcgtcgccagcacgtctttgtcgtcggtgaactgcatcaggtattcgtagacgatcttggcgcgcgattcggcggctatgtccgaacgcagatcgaccgtcaggtcgctgttggcattgacgtaggagccttgccacggcacgccgttgctgtcggtgagacgcggaccgccgcccgtcagtacgccgaactgcggattgatcgaaaaggccgaatggatgaaatcgtccttcgaaatgctttcgccgaagacgtcgttgcgctcggccgcatccttcaggttgccgttgacgccggcgagcagcatctggatcgtggcgccgacgatttcgaggtggcccagctcttcggtggcgatatccatcagcatgtcgtatttgtccggataggggttgtggcaggcgaacgcctgcacgaaatactgcatcgcggctttcagctcgccgttgccgccgccgaattgttcgagcagcagccgcgcgaagcggggatcgggtcttgacacccgcgctttgaactggagttctttggaatggtaaaacatatattcgctgtattaagttgaacatgccggaagccggcctgactattgtttctgcttgagactctcctcgttcatgcggcttccgatgctctgttcccggtcggagcccttctcctcccagtacgagcctttcttcgagccgtattgctccttgttgtccggctgtggccggtagctgctgccttcggtgccgcctgcgtgcatgccgctgttgtcgcggttgtggctccggctgtcgaggtcgttcgtattgccgttttgcatcggggcgctctgcgtatcgttttgctgttcacggctttcgccgtgcatctggtttgtcttgtccataatcgtgatttttaaatgattcggtttaatctgtccgtcccggattcggggcggtcgtgaccttcggtcttgacgatcttgttgtaaaggcccatgatcagcagcggggcggcccactggccgacgagcagcgctgcggatttacggccgcggaacatcatgcaggccgagaccgccaatgcgcccagaccggcgctcaggtagaccatcgagggaattttggaggtctttttttctacggcaacggtaaccttgccttcttgtgatttgtcgtttgtcatgattgtacgggtttaaaaaccggagcagtttcctgctccggccgcaattaacacacacgacgatccttagtagatcgttatcttgacgattccgtcgacggcgggaaccgggtaggtgtcgccgactgcgctgatggccttgtcttcgggcatcagcgttccgccgaatacggactgggcattgccggcgccgggatactggcttacggccgtaccgtcgtcgagcaggacggtcttgctcgttatgtcgcctttggtcagtgcgttaagctcaggaccgttggcgaagaaccagtcgttcgaatagccgaacatcgttgcgaacgctaccttttcgttggctgcggcctcataggtgcattccatgctctcgcccggcagggcggtcttcgtaatcgtgtagatcttgcgcacctgcgggactttttcgagcgaagctttcagctgtcccggatcgccgcgctgtgcgagagccgccagaccgagctgtgcgtctttctgtcccagctgatagatcgggttggtgttgcccgtgtagactactacgatggcgccgtgcagcgtggtgatgattcccgtctgatcggctacgagcgacttcaggggatcgacgttgcccgcttcggccagtttggtcagctccacgcccgatttctgatcgacgttgaagaacggcttctccatcaccagcttgccgtcgagcatgttcgatacgacgaatacgccgccggagaacggagtctcgttcgaggtgccgttagagatgttggagatcgtgcaggtgaacagcgactgtacggcgtcgaaagtcagacttacctgaagcaggctcgaagccgccgggtaggtgtgaccctccgtgtccgtaccgttcacctcgctcactacgccggcctgagctacgcccggatggttgacgttggggccgggctgttcgttgacgcgggttccgttgtcccagagtttcacggcattggctatgacgccggtataggggacgcccgcatcgttgaagagtgcgatgcccggattctcaggggcgaagaacaggtcgttggaataggaatacatcgtggcgaacatcagccgctgtcctttggccgcatggaatgtgaacgaggtcgtcgcaccgggagcgacggcggcgaacgtgccgctctgaacgtaattcttcgtcgggattacgttttcgaacttgatcgtcggcttcgtgccgggggcgctgttgtcgtcatcgtcgtcacaggccgtaaaggcgaatcctgcgaaaagcaaagccgcagcgaatgcggtgaaaaagtacttttttttcatagttgatagaatgattaattaagttaatactcggttaaaccgttattgccatttatattaaggtatatgctcgtatttgttgtccggcacccttttcgatgcagttgcgtgcatcatttatgccatgaaaaatacttttggatggattgaaaaaacgggaggatggatattcctgcaaaacacgcagtaaggggtggatggatttttttcgggttttcggaccctgaggtagaagcttcttcctgcggaggttcggtcgctgttcggcagattttttgcggaccccggagtgtaggcccgccactccccggccggggagtggcgggtgaaataaccacacaaacgggactgcgatgacaaaaaaccttttgaccctgcaacgggacgagactaccttgtgcgaagtttaccgccggctggccggactggaaaaggatccggtccgccgacggacgctgctgcgtatcatgcaggacgaaagacggcattgcgaggtcctcagaagccgtacgggccgtacggtgactcccgatcccaaacgtgttttgtggtatgtgggcatggtcagggtgctgggacgggctttcgtggtccggcagatggagcagtgtgagaaaggcacggcggcaagctattcgcgctatcccgaacgcgaggagttcgtgcggatagcttcggaggagagacgtcacggggagaagctgacgacgctggccggcgggatgcgattgtgctacataagttcggtcgtgctggggttgaatgatgctttggtcgagttcacgggcgcgctggccggattcacgctggcgctgaacgagccgcggctcgtggcgcttacgggcggcatcacgggcattgccgcggccctttcgatggcggcttccgagtaccttgcgaccaagtcggaaaagggccgggagaagcatccgcttcgggctgcggtctgcaccggggtcacctatctggtgacggtcgccatactgatacttccctatctgctcttttcgagtgcgcttgccgcgctgggagtcatgcttctggcggcccttaccgtgatcgccctgttcaattactattacgccgtggtccggtgcgagagtttcagacggcgttttttcgaaatggccctgctgagtttcggcatcgccggaatcagcttcctgatcggctatatcctcaaactgtttacgggtgcggacgtatgaggcggccccgcagtccgttcgtgctgtccggcaggccggatccggacatgcggcggcttgggcgtcccctgaaaaaaactgattctcagcatgaaaaatatttttcgaacaatttcaacctcaatggaataccatttgcaggtattccggtatcattcatcacttaaattctttatattatgaaaaaaattcttttactcgtcgcggctgcggtatttgcttttgccgtaagcgctgctccccagaaggtggatttcggtaaactgccgaagaactcgcaggaattcattcagaaaaatttccccggcgaaaaggtgaaggccgtggagatggaccgcgaggcgtcgtgggacaagtacactgtctacttcaacagcggcaaccaagtctctttcgagggcggcagcggcgattgctcgcagatcatcatgaagaacggttcggttcccatgtcggtgattcccgccaagatcaagacctatgcaggcaacaactatgcggggcagcggatcgtcatgatggagacgaccgccgacggctacaaggtggccctcgcggacaagacggtactcgatttcgataaggacggcaactttacgaaagctacgaaatagtttttgccgtatgaaaagcgcagggggcgaccgtcgtcatgctccctgcgtttttatgtctcgaacgggccgtgcaggcccgaattgtaattctgtcatgccatgtgttatcatattttcctcgctgccgggcctgaggagcttgcccggcatttcggccggaaggccgatctgatccgtaatctccgtccgcccttgcgtgcctgcgcgttttcgcatctcccctatccggtcctgatcggggacgagcagatccggtattcccggtgggggctgattccctattggctgcgcagaccggaggatgtcgtgacggtccgcaaccagacggtcaacgcccgtgcggaaaccattttcgaaaacgcgtcgttccgggttccgatccgtcagagacggtgtctggttcccgtgagcggattctacgggtggcgccatgaacagcatcgtaagatccccttgtacgtgaccctgaaggagcgtcctctcttctcattggccgggatttacgatcgctggtactgccgtgcgaccgctgcgtggacgacgacattctcgataatcactaccgaagccaatccgttgatgcgctacgtcaacaacgccaacggccggatgcccgtcattctccgtcccgacgatgagagccgctggctcactcccgcgctgtccgatgcgcagatcgtcgccctgctcaaaccttatccggagcaggagctgcacagcgaacccgtgcggtgcgacttcatgcacgaagtcgctgccgatccgggcatactcgtaccggcttagacgggcgcagcagaaaagggaagtccgaagacttcccttttctgctgccgggactgccgggtcatactttctccttgatccggttcgccgcctgcgtcgccgtctcttttaccttgtgggcggctttggtcatgccctctttggtggcattcttgactttcgtgccggcctcttcgattttgccggccatcttgtgaacgcccgttcgggcttcgttctttgcttcgatggccgcctcttcggcgtcatccttcagcttctgcatgttttcctgcaggttgtgtctggccttctggccgtgttcttctaccttgtgaaccgctttttcggcatgctcccggtaggtttcgttctcttttgtcgaatacttttccataattacatcgttttagcgggtttgtgccgtgtgaacagcgatacgatccacagcaggacgatggcgccgatgatcgacgagaggaaagttccccatgtgcccgtcggaacccatccgaacaaagaaacgagccagccgcccagaatgccgccgatcagaccgacgatcagattgaccagcaatccggagccgctgcccttgaaaatcaggctggcgatccatccggccgccaagccgatgagtaaataccataagaaatacataatttttataattttggttgacagtcaatgtaatacaaaatttgtaccccggaggatgaacttccgggaaattattcgcagtatgcgataagcgccgaggagggggccatgcggacgacctctccggagagacgctcgcggctgtcgggatcgatccggccgtcgcggcagaccacgatccgctccgcttcgggaatccggaattcggccggatggcggttgccgttgtaggccaccagtatctctttccacgcatcgccgttggcgtgttcgcccaaagtataggcgatcacgcccgaatcgcccgtgtcgaggaaccggagccactgccgcagcccttcggccgtcgggatgcggaacgccggatgcgctttgcgcagggcgatcagttgccggatgtagtcgaacagcccgcggtgttcggctttcagcgcccagtcgatttggttgacggcatcgggcgagcggaagctgttcggttcgccctgcttgtcctgcatcatctcctcgccggcgcggataaagggaataccctgcgccgtgagcaggatggtgtgtatcagtttgtcgatcgggagcagctcctcttctgcccggtcgcccgtgacggagagccgcagtttgtcgatgaccgtgtaaccgtcgtggctggcgacgaagttgaccgcttgggacggggcggccgcgtagggcacggagctgtatagcagtccgttgtaatctacctgaggatgctgcgtggcgccgacgatcccgaattttacgggttcgtagtgtccgccgatatttccggaagcgtatccgcaggcgtgttcgtcgaacgtgctgccccgcacggcgtcgcggaagtcgtcgcagaaaacggcgatgccctccatctgtccgacgtggtcccgcacggcgcgtttttccggcggcaggggagagtcggccgcaagccacccctcgccgtagatgaagatggtcgggtcgattttcgacagctcctcccggatgcggttcatcgtctcgatgtcgtgtatgcccatcaggtcgaaccggaagccgtcgatatggtactccttcgcccagaatttgacggactcgacgatgtagtgccgcaccatcgcgcgctccgaagccgtttcgttgccgcagccggaggcgtcggaataggagccgtcggcgttgtggcggtaaaagtagccggggacggtaaggttgaaattcgaatgctccaccgaggccgtgtggttgtagaccacgtcgagaacgatgcgcatgccgttccggtgcaggctttgcaccatttgcttgaactcccggatgcgtgccgcggggtcggccggatcggtggagtaactgccttccggaacgttgtagttcttcgggtcgtatccccagttgtaggtcttgtcgttcagtcgggcttcgtccacggtcgcgtaatcgaaggagggcaggatgtgtatgtgcgttacgcccagctctttgaggtggtccagtcccgacgcctccccttggggtgtcttggtgccggtttcggtcagggcgaggaatttgcctttgttttcgatcccggaatcgggggcgacgctgaagtcgcggtggtgcagttcgtagagaatgatgtcggaatacattttcagttcgggcgcacggtccgcctcccagccttcgggatcggtctcgcgcaggtcgattacggccgcccggtcgccgtttacgccgaccgccttggcccagatgccgggcgtttcgtccagccatttcccctctttctcgatctggaaggtatagaaagtccctttcagatcgcgctccgcggcgacgcgccatgtcccgtcgtcggagggccgcatctccagccgctcctccggttccccgccttcgcccgaagcgtagaggttcagccggaccttgtcggccgtgggcgcccaaagtgtaaagacggaacgctggggagtgtacgccagctccagatcgctcccgtaataacagggatatttgtcgaacgcatccggctggccggtcgcgggacggttttgctgagtcgtcatgggatgttttttaggagttctgaatttgcgtaccgtctgcggctgccggttcgccgccggctttttccgcgtcgtcctgatgcacgagcagcgtgcgtgtggggaaggcgaatgtgagtcccgctttggcgaaggagtcgaggatctccagattcacgtccgatgtcgttttcaggacgtcgccctgcttctcgatgtagtagtagaacgtgacgaccagcgccgagtcggtgtagtccgagaagtaggccgtgacgtccgacggatttccggaaacgtccttgattttcgcggggatggcccgcagtatctccagcgcctgtttcatcttttcggctcccgtgtcgtaggtcagccccagcttcaccatggcccgccgcatcggctccgaggagatgttgacgatggaggcgtccgtgatcttgtagttcggatagctcgtgatgcgccggtcgtagcccagtatccgcgtgctgcgcatgcccacgtcgatcacggttccctccagtccgttcacgttgatcgtgtcgccgatgccgaaaggcttgtccgtaaagatggtgaatgcgccgaagatgttcttcaccgtgtcctgcgcggccagcgcgaaggcgatgccgccgatgcccagcgtaccccacaacgcattgatgtcgacacccacgttgctcagggccgttaccagaccgatgatccagatcaggaccagaatcgtccgcctgaccaccggcatcattttcaccgcatggccgtccgacctttgtccccagtactgctggagcagggccgtggagagacgtgcgaggacccacgttatgtccagtatgatcagtatgcggtaggcgttgtctacgtacttcaccaactggtcgggatagaccagccggtgaatggcgatccagatgcccagcagcatcacggcgaatttcaggggcgcttcgagggagtagtagatgatgtcgtccacccggttgttcgtgcgggcgataaacggctttatgaccttcctgcccagcagggagagcagttttacgacgacgaacgcccctattacgatgagtatggaaacgacccatgtctggaccgtatttccccaaatttcatattccaacatttttcgatcggttttaaattatctgttcaatttgttatttatgtctcctcttttgccatccggatttttacaatggcgcatgccgcgaggtttttttcttatccggagattcaatttttatgcctttggagacaaatttgcacgatttcggaatgaaaatctggttgaggatgaggatgataattcataaatcgaggaagaaggcggtgtgtatcaccgtcgcagggctgcttgcgggcatcgccggcggacttgttctgtactatgtccgcgacgtcgttctggggtggtgtttcgtgataacggcgggcttcgccctgttgtacggcatgggatcgctgttcgaacgccgcccctatatcgtcctgaccgaatacggcatcaccgaaccgttcgcgatccgcgagcagatcgagtgggatgccgtcctttacgcggacgacttctatttccggggccagtactgggtccggctgctgctcggccgcgactacaagccgcagctcataaggccggcttggttctggcggttcgaccgtctctacgagtcgaaaggcgtcaaggcggtttatatccgtacgatgggactggaggtcgattcgatgcggctggccgcactgatccgcaggatgaaagaggcggatatgtccgagaggatcggactgctcagggaattccgttcggagtgacgcggaatccggtgtactttttcagccgattttcaggtacaccgaataggccaccgccgacctgcgttacattgctttttaatgcctgtggactaaatacacaaaaccctgcaaatgtgtgatttgcagggttttgctgttttattcgttgtatttctgcggagagagagggattcgaacccccggtacagttgcccgtacaccgcatttcgagtgcggcccgatcgaccactccggcatctctccaatctcccggacgaaaaacctttcgtttgggactgcaaatatagacatattttttatttctcggcattttcgtgcgaaaaaaaattcagtccgcaggaaaaaatgcggctatagcggttcgttttgatgcttttgccaaataatttctatctttgtatcaggcggacaagtgcagtattgctgcgctccggccgtttatatggtgaaaacgatactaaaagcggtatggttttcgtttattggaaaagaactaacgcaaacaccatgtgcgctatgaaaaagttgaatattttaattggaacccttatcctgtctgcaggattggccggctgttcgtcgagctactatgcgtcgtcggggtatgccaacgacgatttgtatgctctgcacgataaaacggccatcgcccgcaagcagcaggccgctgccgaagcccgcaaggccgaggccgaggcgcgccgcgccgagtgggaggcgaagatcgccgaagcgcaggctttggctgcggagaacggttattacgacgagtcgagttcgaacccttacaacgatattctggccgatacgtacgagagtgcctatgcgcgccgtctgaggggattcgagtcgccgacctaccggatgccgtcgagttactacaacttccgctacggcagttcgttcacctatgccacggcgtatgatccggctttctacaacatcatcatttccggcgacgaggtctgggtcgaacccaaatacataacctcgatgttcggaacatggggcggcacgccttacggcggctggtatttcggctggaactactcgccctcgtggtggggctatcccagctacgcatggggcggctggaactggggcttcggcttcacttggtatgatccgtggtggggtcccggatggcatccctactggggacccggttgggggcccggatggggcggcggctggcatggacatcaccatgcgggatacaggccccgcgactattacggcaatcccggcggacgcggcaggagctacactcccggccgaagcacttcgggggcgcggtacggcaacggaggttatgccggcggttcgcgcggcggccgcaacggctcctacagcaccagctacggcagccgcaacggcgacagtccgttcagcagcggctcgcgcggcagcagttacaacaaccggggcagcagttacaataaccgcggtaacagctataacagcggttcgcggggcgatttcaacagcggctcgcggaatgacttcaacagcggttcgcgcggcagcagctacaacgaccgcggcagttcgggcagcggcagcagcttcaacagcggcggttcgcggggcggcagctccggcggcggttacagcggcggcggctcgcgcggtggcagttcgggcggcggaggacgcggttatggcagtcggtagcaactaaaacggagagaattatgaaaagcatgaaaatagtggcattgtgcgcggccttcgttgctgcggcgcctttgcaggcgcaaaatacgggtctcgaattcggcggttcggtgctgaaccacgacatgttgtgggctaccgatctggcgcagctttcgcagacgcacgttttcggcacggcccgcgtgatgggtatgggcggggctttcacctcgctgggcgccgacttgtcgtcgatgtcgctcaacccggcggggctgggcatgtaccgccgcaacgagatttcgctcacgccgctcgtgcccatggcgaaggcatcgaccgcgggaacggcttcgtggaagggaaacagcaaatcgcagttcgcattcgctaacgtgggcgtcgccctgaacgtcttcgagagttcgagaagttccctgaccagcctgacgctcggtatcggcatgaaccgcatcgcggatttcaacagccgctactcgttttcgtcggaatcgcgctacgatcccgaccggcccgaccggctgatgccgacgatcgccgatatcttttcgcagcagatgaataatttcggcgtaaggcccgaccgcgaggccgagggcggaggcccgaacggaccggttcccgtcgatgcgtggaatcccaatgtctggccggccatattggcctacgacgcctatatgctggggaactacggaacggtgaaggacccgatctgggcggtggagcgtatcggccgcaacgcttcggtgctgcattcgatggatgtggtgaattcgggttcgatcaacgagttcacgatttcgatgggcggcaatatcaacaatatcctctacttcggcgcgtcgatcggcattcagagtgtacataagaaattgggcgtgacctatcaggaggaatacggctatttcaacacggacggcatcggacacgacggcagcggcaatgcgctcgccgagcagctcgacgtgatgaatctctatcaggagatggagatgaacggcagcggcgtgaatttcaagctgggcttcaccgcacggcccctgaccggcctgcgtgtcggcgtggctttccatacgccgacctactattcgctcgactactcctatcgggccgatatcttttcggatatcaggaataatgccgacaacaaggtggctacggtgggaaacgccacgccacgggccaacaacagcggcggcaacagctgggatttcacctcgccggcacgcctgatgttcggcgcttcgtatacgttcggcactttcgccatcgtgtcgatcgattacgagcgcgactggtacaacgggatccgcgtgaagaacgttccgcagtataactacttctccgaagaggactacaaggcggagttcaagcataatttccaaggcacgaactcgatccgtgcgggcgtcgaggtcaagccgctgccgattctggccctgcgcgtgggcggcggttataccgattcgatgctcaaggagcgggatttctatgtgaacgacgcctataccagcatgccgacgacctatgagagctactatttctcggccggcgccggcgtgaacctcggacgcaacacgacgctggagctggcctatcagtatgtcaccaacaagcagacgcagtaccagctcttcttcagcaggcccgaaaacggcggcgacatggagacgtggagcggtctgtacgacacctctctgaaacgtcactatctggccgcgacgctcagcttccgtttctgatgcggccgtttcgtcaatataaaggtccgtcccggtgacggacctttatttttttattatatttgcaggctgaaacaaaatcaaaaataaagatatatggcaaaggaactcaaggacctcaccaagtcggacgagaactactcgcagtggtacaacgatctggtcgtgaaggcggggctggccgagaattcggccgtacgcggttgtatggtcatcaaaccctatggctatgccatctgggagaagatgcacgacgcgctggacaagatgtttaaggatacggggcatcagaacgcctatttcccgctgttcatccccaaatcgttcttctcgaaagaggcccaccacgtcgagggctttgccaaggagtgcgccgtggtgacgcactaccgtctgaagaacgatcccgaaggcaagggcgttgtcgtcgatcccgacgccaagctcgaagaggagctgatcgtgcgtccgacctcggagaccattatctggaatacctataagaactggattcagtcgtaccgcgacctgccgatcttgtgcaaccagtgggcgaacgtcgtgcgctgggagatgcgtacgcgcctgttcctgcgcaccgccgaattcctgtggcaggagggccacacggcgcacgccacgcgcgaggaggctgtcgaggaggccgaaaagatgattcatgtctaccaacggttcgccgaagagtggatgtcgctgccggtggtggtgggccacaagtcgcccaacgagcgtttcgccggagccgaagatacgcttacgatcgaggcgctgatgcaggacggcaaggcgctgcagagcggcacgtcgcacttcctcggccagaatttcgccaaggcgttcgacgtgcagtacgtcaacaaggagggcaagctcgaatacgtgtgggctacctcgtggggcgtttcgacccgtctgatgggcgcgcttatcatggcgcattcggacaacaacggtctggtgctgccgccgaaactggcgccgattcaggtggtgatgattcccatctacaagggcgacgaccagctggccgagatccgcacgcgcttcgaggccattgccgcgcagctcaaggccaaaggcatcagcgtgaagatcgacgaccgcgacaacgtgcgttcgggcttcaagttcgccgaatacgaactcaagggcgttccggtgcgtctggcgatgggacctcgtgacatggaaaacggcacgatcgaactcgtccgccgcgacacgctcgaaaaacagaccgtttcgcaggagggactcgtggagcgtatcgagggcctgatgaccgaaattcaggagaacatctaccggaaggcgctcaactaccgcgagtcgatgattaccaaggtcgatacgtgggaggagttcaagcaggtgctcgacgacaagggcggcttcctgctcgcgcactgggacggcacggtcgagaccgaggtggcgatcaaggaggccacgaaggccacgatccgctgcattccgatcgacgcgcccgacgaggagggtgtatgcgtcttctccggcaagccgtcgcaccgccgcgtgctgttcgcccgcagctattagtctgcggcgggcgcgatgccgcgcgatcatatggaatatccccggcgaatatccgccggggatttttcggcccgttgtgtcgggtggtgccggccgtgcggggcgcgcttagggatgggggaagccggccggaaaagcgatcgccggtcttgtgtttccgtaaatttcactatttttgttcattgtcgtaaaaacgtgcgttatgtccggtgaggctgaaatccgcaaaaagaaaatataccgcgtgacctttatcggtttcgcggtcaatctcctgctcgccgggatcaaactcgcggcgggtattctgggccgaagcggcgccatggtcgccgacgccgtacactcgttctccgacatggcgaccgacgtggtggtgatcgcctttgccaagatttcggccaaacccaaggacgagggacacgactacggccacggcaaatacgagacgctcgccacgatcatcatcagccttgcgctggctgccgtaggtacggggattctggtgaacagcatcggtgccatccgcgtcgttgtggacggagggctgctgccccgtcccggcaccgtggcgctgctggccgccgcggtctccatcgtcgtcaaggagattctttaccgctatacggtgcgcgaaggccgccgggtgtcgagtccgagcatgatcgccaacgcatggcatcaccgcagcgacgccctttcgtcgctgggaacgctggccggcatcgggtgcgcctattttctgggcgataagtggcgcatcgccgacccgatcgcggcgctcgtcgtggcggttttcattttcaagatcgcgttcgacctgattcgcaccggactcgacgaacttctggaacgttcgcttccggaggatgtggaagaggaaatcctgcgtgtcgttgcggcgaatcccgaagtgcgggagccgcacaacctgcgcacgcgccgtatcggcgcgtcgatcgccgtcgaggtgcatgtgcgcgtggacggcgcgatgagcgtctgccgctcgcacgagctgaccgaggacatcgaacgccgcctgcgcgcccggttcggcgaaggcacgatgatcgccattcatgtcgagccgctcaaggcggcgtgccgtgcggagtgatgccgagtggcggggtggattcccgcgaaaaacggcgtgccggttcacccgcctcttcgaccgtttcgccttgaccgctgattccgaataaaatgcctttcggtgctgtcccggcacggattttgctgtttctgcaatccgaataaacaggccgggacattcccgccggagtagaaagaaatttggattttcggaaaaaagtgtttatcttgccgccgataaggctccggagctccgggtttccgaaagcccgaacgatgaaattatcgacatacacaacttaaaaaggattgcctatcgggaaaagtctactcttaactacatttaggagacaagagtatgaacgtgcaagtattaagtgaccaggtattgcttaatcactacctctcaggtgaccaaagtgccatatccaagctcatcgaacgccatagccgccgtgtgcgcgactacatcaatatgatggtgaaggaccgcgatgttgcagaagatatcttccaagagacatttatcaaagccgtgcgtgtaatcgacgacggccgctatacggacaacgggaagtttctctcgtgggtgctgcgcatcgcgcacaatcaggtgatcgactatttccgcgcccagcggcagaacaaggccgtcaccgaagccgaagccggatacgatgtattgggatcgctgcgtttcgccgagcggaacgtggaggacgccatggtcagcgaacagatcgagcgcgacgtgcgcgctctggtcgaactgctccctgccgagcagcgcgaggtggtgatgatgcgttatttcgccggtctcagtttcaaggatatcgccgagcagaccgacgtgagtataaacaccgcgttgggccggatgcgctatgcgcttatcaacctgcggcggatgatcaaggaaaaaaatatgattttgtgctgaccggcacacaatatttccaaaggcgcggcgtttagttagtacaaagcaaaattacaagatgcctatggaggatattgacaaaaacgaagtttcggacgacggcatctccgatgaagaagaacttctgcatcgggaggtgattcagggtgatgcggatctttactaccttcaccactacctctcggaagtttttcggaatggggataatttttaagggttaatttttgatggggaagggcgccgggaggcgcccttcattttaagggatacggcccgttcgcgcatctctttttttaattggacgattatgaaattcagcaatgtaagattattggtcagggactatgaaaagtgcttccggttttataccgaaaaactcggtttggaggcggctttcgatatcgaaggctgttacggcagtttcaaggtggccgaaggcatcgagggggtggcgatatttacgtccgacctcatggcgccggtcgccgggaacgcagacaaggagctaccggccggctgcagggataagatgatggtatcgtttgaagtcgacaatgtggacgaagccttcgaaacgctctctgcaaggggcgtggagtttgtcaaccggccgaccgacatgcccggctgggggatgcgggtcgtgcatctgagagaccccgaagaaaatctgatcgaactttttacgcctttggcagcgaacttatgacacgcatacgaatcaaacgcgtttacgaacccgccgctccggacgacggctgccgcgtgttggtcgataaactgtggccgcgcggcgtgcgcaaggatgcgctgcattacgacatgtgggccaaggagatcacgcccagctccgaactgcgcgcatggtaccacgccgatccgcagacccgctggccggagttccggcgccggtatctcgaagagctgcgcggctcgcaggccgtgcgggagtttgtccgccgcatcgccggaaatgagaccgttacgctgctgtacgcatcgaaaaatgcggccgagaatcatgcgctcgtcctgcaggaatttctcgaacacgccgtgacggagatcgcgcacgcctgaccggcgtgatgggcgtttcgctccggccgtttggttttgtgttttcggggcttgtgccgtttccggttgcatcggtttcgccgccgggaggggttggtgtgccgtggtgtgggaaaggggaagcccctctaaggaggggcttcccgtgtgaacttttttttgtgtggcagtcgctgtttggggacggcagagttcccggtgcggcggcggagaacaaaaaaagcccctcggtgcgaggggcttgtacggtgaggcagacttgacggcgtacggaaatatcagcggttgccgagacattggtgcgcccgccgcagctggatcgaaagcgaacaggcggcgatgccggcgaagagcagcgaaatgccgacccagatcacgacggccgtggtgccgaataccagcggctggaacagaatccacaacgagcagagcaccagcaggatgccgctgaagacggtccagcccgatccgggaatctccatggcgttcatgtcgccgcccagaccgatggcgctgaatccgcgcagcatgagccagaaaccgaggaaaatcggcagcgtggcggccgaaagcgcgacgttgaagatcaggatgatgccgaggatgatttcgatgatgcccccggccagcatccagccgcggcccgtgatgaagtgtttgttggccgacgaaagcacgacttcgagaatgcccgaaaagagcatcagccagccgaatacgagcgacatgcccagataactttgggtggggtagacgaatatcagaatgcccacgacgaacagggcgatgccgatgatcaggagcagccaccagtaacgtacggcccgcttcgaattttcgatcagtgaggaaaaattgttcatagcatatggattttcctccctccggagcaaattgcataccagagccggagcgctcaggtcctgagtatgcgtggtaaaggccgttttttccgcgggtgtcggatgcgggtttccgtggccgtaggtcggcgcctcactgccgccgcagatgtttcggcagagatcgcttcggcgaagatgtttcggcgcaggccgcttcgctttgccgtaggttgcttcagcgcgggttgtttcggcgcggatcgcgggcttccggcggaatgagccggcggaaccggcatagccccgttgaagccggaccctgtccgatgcgctataatcccgtcggatcgtcggcctgcgcacgctccggttgcggagtttccagcggaaccacctcgccgatttcgggccgcaggaggtgcagcgcggtgtccgcggccaatgccgcctcggtcgccagcggctcgtcccagcggtgcttggcaagggcgtatttcgagtggtggacggtcatgatccgccttgcacccaactcttttgcggctttggccagttggtcgggcatcgtgtggatgtatttccacgcttcgtcgtactggccgttttcgagaacggcgaggtctatgtccggaaactcttctccgatctcggcgaaatgacatccgtatccgccgtcgccgcccatgtagattttccgcgcgggcgtttgcagcaggaacgatccccacaacgtctgattggacgaccgcccgcggccggagaagtggcgcgaggggagacagcggacggtgaatccgtcgccgagcgtctgttgttcgtgccagtccagctcgacgatcttcgccgggtcgaagccccagtactcgaagtgctcgcccacgcccagcggacagatgaccgtgccgatgcgctctttcagctcgcggaccgtgcggtagtcgagatgatcccagtggtcgtgcgtgacgatgaggtagtcgatgtcgggcatctcttcggggcggtagatgtcggtgcctttgaacggacggttgagcatcgagagcggcgccgcgttgcggaaaaccggatcgacgagcgtccggcgcccttcggcctgaatcagctgggacgagtgcccgaaccagaccagcaggttgcttttgggatcgagcgcccgcaggtcggtgcggatcgccggcaccgcatcgtggggacgcagtccctcgcgcttgcggaagaggaattccaatatgccgcgcaaccggctcttgtcgcccgtcatcatcggaccggcttcctgattgcggaaccggccgtcgcggtagttcggcgactgccggatgcgttcgagccgttcgccttggggcagacgcccgaagctcggcagacggacgatgacgaatgcggcggccagcgtcgcgagcaggatgcttgagagtattatcattttgcctcttttttgcttgcccgacatgatttttcaggtttgtatagtgcaaatataccgtttcttccgagacggtgcgtatacggattacggttcgggctaccattattccggaaatgtctccggcagcggccgccgataggttgttccgggctgttttgaccgacgattcggctgatttgttctatttattatgatataatgccaaagttttatatttttatgacggattgtttctgcaatgtgatgccttatacgtcttactctgaaaaattaccgggacccggttgccggattttattccgcactctggtcttgacgttctgtttgtgcctgctctccggattcgaagtccgggcgcagtccgcgcaacggaagttcgtggtccggggccacgttaccgaccagacgggggcgactcttgtcggggttaccgtcgtggaacacgggacttcgaacggcgtggcgaccctctccggaggcgaattctccatcagcgtcgctcccggcgccgtgctcgacgtctcgtgcgtgggctatgtgccccgcagtgtcccgaccgaaaaccgcaccgggttggacatcacgctggaggaggacgtgaaagttatcgccgacgtgatcgtgacggctctgggactggaacgcaactatgccgacctgacctattcggccgacaagatcaagggaacgcagctcacgaacgtcaagtcttcgaacatgattctctcgctcgcgggcaagtcggccggcgtgcaggtgaacgaaagctcttcgggcgcgggcgcctcctccaaggtcagcatccgcggcgtccgctcggtggccagcgacaatcagccgctgtacgtggtcgacggcatgccgattctcaactcctcgcctgagcaggtctatacggccatcgggggtgtcgccgatgcgggcaaccgcgacggcggcgacggcatctcgaacctcaatgccgaggacatcgagagcgtctcgatcctcaagggtgctccggcggccgcgctgtacggcagtcaggccgccaacggcgtgatcctgatcacgatcaagaagggcagcgccgcgaaacggcagcccgtgaccttcacttcgaaccttacgttccaaagccctttccgcctgccggacttccagaaccgttacggggtgagcggcgtcgtcgaaagctggggagctcgcgccgcgatgaaggcatacgacaacgccggggattttttccggacgggcgcgttacggcgatgaactcgctgtcggtctcttcgggcaccgagcagatgcagacctacttctcctacgccaataccgccgagcgcggaatcacgggctcgaaccgcctgatgcggcataacttcaacctgcgggcgacgaccgggctgttccgggaccggatcaagctcgacggcaacatcagcttcatgcgtcaggtcgtgaaggacaaaccggtgccgggcggattctacatgaacccgctggtcgggctttaccgttttccgcgcggcgtcgatatgactccctaccgcgagcatttcgaggtctatgacccggaccgcaaactcagcgtgcagaaatggatcgctccgagcgacgatttcgaacagaatccctattggatcaccaaccgcatccgcagcaagagcctgcgcaaccgggtcatggcctccctctccgccgactggaaggtgaacggctggctgcgcatccgcgcccgcggcaacgtcgactatatcgacgacaaggtccgccagaggttctacgcctcgacggctccggcgctggccgggaacaacggccgttacatcgaaagcggttattcggagacccttttcaacggcgaggtgctggccctctttgacaggcggttcacgcccgactggacgttcagcgctacggtcggcgcctccctgaacgaccgcacggtgaattcgctgcgcatcgattcgaagaccgcgtcgctctattaccccaatgtgttcaacgtggccaatatcgtcatgaacagctcggcctacgtcgacgagcagatcgacgcccgccgccagatacagtcgctcttcgccacggcttcggtcaaatacgccgagagtctcaacctcgaagtcacggggcgcaacgactgggcttcgacgctggcctacacctcgcacgagggcagcgggtttttctactgttcgttcggcgcgtcgtgggtcgtcggcaagatgttcaaactgcccgaatggatgtcgttcgccaaggtgcgcctgacgtggagccgcgtgggcaacgacattccgatgttcatcaccaacccgaaggcccacattacggccggcgggggcatcaacgccgccgatgctgctccgggcaccgacctcaagcccgaaatgaccaatgcgctcgaagcgggtttcgaatggcgtttcttcggcgaccggctgggaatcaacgccacttactacaagaccaacacccacaaccagttcttcaagctgccggccctgtcgggcgaagcctatgctttccggtacgaaaatgccggcaacatcgagaacgagggcgtcgaggtgtcgctgagcgcctatccggtttacggcagcggtctgacgtggcagtcggtcgtgaacttcgcgcataacaggaaccgggtgataaaactgcacgacgaactgcgcgaatatgcctacggtccgtcgagtttctcgtcgtcctacgccatgaaactggtcgagggcggggcgatcggcgacatctacggccgggcgttcgagcgcgacgccgacgggaatatcgtttacgaaaccgaaggcgattacgccggtctgccccgcaccgcgggcgacggcaataccgtcaaggtaggcaatgcgaatcccgtgttcgcgctgtcgtggagcaacaccttctcttacaggggcgcgtcgctgtcgctgatgctggactgccgttacgggggccggctgctgtcgcagaccatggccgacatggactcctacggcgtctcggccgcaacggccgacgcccgcgaccgcggttacgtgacgctcgaagggcggcgtatcgacgacgtgaaaggattctacaagctggtcggaggacgcgccggcgtgacggaatactacatgtacgacgccacgaatatccggctgcgcgaattggccgtctcctatgcgctgccgcagaagctggtccgccgcacgcgggtgctgagcggcgtcaccctgtcgctggtcgcgcgcaacctcttcttcatttacaacgccgcgccgttcgatcccgatctcatcctttcgacgggcaacgataatcagggaatcgaagtgtacggcatgcccaccgtgcgcaatacaggatttaatatcaaactggaattttaagcatgaaatgccggcatacatatcttttcgcgggactttgtgcgctgcttttcggcgcgtgcacgggtaatttccgcgacataaacgacgacctctccggcattaccgacggcgagctggaagccgacaacaacggtttgggataccgtctgggcattatccagcaggggggggctatttcaattacgatttcggcaagggcaagaactggcctttccagctcacgcagaatctcaatgcggacatgttttcgggctacatgcacgacccgaaacccctgcagggcgggagccacaactccgactataacctgcaggacggctggaacagcgccatgtggcagttcacctactcttatgtgatgcccgaaatctaccggctggagcagaccgccgctgagctgatgccgcccttctatgccattgcgaagatactcaaggtgctggccatgcagcgggtgaccgactattacgggccggtgatttatacccatttcggcgcgcagggcgccgaatacgtgcccgacggccagcaggaggtctacatgcacttcttcgacgatctggacgaagctgtagagattttgtcggattatgtcgcggagcgtccgatggccggcgaatttgcgaaattcgacctgttgctcgacggtagctatgccgcatggctccgcttcgccaactcgctgcgcatgcgtctggccgtgcgtcttgcgtcagtcgcgccggagaaggcccgcgcggagttccgcaaggcggctgccgacccgtacggggtgatcgaggtcaatacgaacaatgcggcggtcaagacttcgggaatctactcgaatccgctcggcgcgatcaaccggagctggaacgaggccgtcatgaacgcttcgatggagtccgtgctgacgggtttcggagacccgcgtatcgcgaagtttttcgaaccctgcgccgaggatctcgttattgcgaatgacggcggggaatccgttcccgttccgttgaaagggcaatatcacggcgtccgtcagggaaccgccttttcgcataactattacgccgccttttcgcggcttaccgtcgagccgacgaccgaagtcgtgctgatgtctgcggccgaagtgtggttcctgcgcgccgaagccgccctgcgggggtggaccgatgaagacgccggaacgtgctaccgcgccggcgtcttcatatcgttcgcccaatggcaagtgtcgggtgcggagcagtatctggaaagcgacgcttccgcggccgattaccgcgacccgatcgccccggagaacgatattgcggcccggtgccgcgtgtcgccccgctgggacgagtcggcggccgcggagatcggactcgaacggatcattacccagaagtggatcgccatgtatcccgaaggctgcgaagcttgggccgagcagcggcggacgggttatccgcgtctgtttccggtgcgcttcaaccatagcaagggccagagcatcgacaccgagacgatgatccgccgcctgccctatcccgcgacgctcgaaacctcggaccccgaacaatacgaaatgctactgaaagagctcggaggtcccgatcacggcggcacccgcctttggtgggacacggggcgcaatttctgagacttgtccgtcggccggaaactgaaacacaccgcttttgcggtgtgtttttttttgttgtgtccggcgacgtccggctggtccgtgtccggtgaatcccggcggcgttgcccggccggggcttagccccggctctccatgctgtctatcgaagggttgaccgccacgacatcctgttcgatctgctgccgggaggggattccgtttgcggatgcgggggcgatggggccgtcgtcggaaatgtcgtccggcgtgatctgggtgcgcgtggtttcctgagtctgctgcggatcggcggaaggctgtcccacttgcattccgcccttgttttcccgcagagcttccttgtcgtatgcaggtcgtttcataattcgaattctttttttgttccgcgtgcaaaggtcataccatagggcggcccgctgccggatatcgtctccgacgggaatttgcacggaatttggggcgggtgcaaaggtattcaccgtaaaccggacgattatgaaaacaaggaatttgttgctgggtatggccgctgtctgcggcagttcctttcaggcggtcgcctgcacgggcatcgcgctcacggctgctgatggcagttatgtgcagtcgcgcaccatcgagtgggcccgcggcgttttgcagagcgaatacgtcgtcatcccgcgcggtcagcggctccgctcctttacacccttgggagccgacggcatgaccttcacggccaaatacggcgtcgtggggctgtccgtggtgcagaaggagttcatcgccgaggggatcaacgaagcggggctgtcggccggactcttcttctttccgcaatacggagggtatgaaccctacgaaccggcgcagaacgaccgcacgctcgccgatctgcaattcgtgacgtgggcgctgacgcaattttcgaccgtcgatgaggtcaaagccgccgtcggaggcgtgcgcatcgtcgcgttggaaaagacgtcggtcgtacactggcgcatcggagagccgtccggacggcaggtcgtgctggaaatcgtaggcggagtgccgcatttttacgaaaacgaggtcggcgtgctcaccaacgcccccggtttcgagtggcagctcaccaacctgaacaattacgtgaacctctatccgggcgacgcccccgtccgccggctggacggcgtaacgctgcggcctacgggcggcaattcggggtttctcggccttccgggcgacgctacgccgccgtcgcgcttcgtgagggccgccttctaccgcgccacggctccgcagcgcgccaccgggttcgagaccgtacagcaatgcctccacctgctcaacaatttcgacattcccatcggtatcgaacatcccgaaggcgagtgtccggacattccgagcgccacgcagtggacctcggctatcgacctgaccaaccgccggatctattacaagaccgcctacaacaatacgatccgctgtatcgacctcgcggggatcgacttcgggaaaacggcctaccagtcccatccgctggaccggaaccgggagcagcccgtgcagcagatcgctattccggagtaagacggcggttgcggtccgttttcggcggctttttcatgttcgtcctgaatattggtgtggaagcgttccatatcggcttggaaagcttttccggattccggacctttgccgcgcaaacgaaaaaaacggcttttcgaccatgtctgtacgactttgcgaaatactgaactacggggatgtcatgctcgaaccgggtgcggatcatcggcgttttacgctatggcggcccctcgccgtctgtcaccgttattgccgattggcgaaacgctccaaatttcaggactatagggtgaatctcacgtatgccgaaatgcgtaaaataggataaggataatgtcgtcctgcttaaaacttcagtggttatgaaaaaggagaacgagagtccctagcgttactatcgtgtcgtaagcgtcaaaaagatcgatcggtggtttttcgaccgatacgatcatcgcagaacccacgccaaaatctatgaaacggtcatccggcccaaattcgggatgtgcgagaatacgtttctcgactaccgtcatgaatcggacgagttgctggaactgtttccgcagtcggccagcgtcgaattttcgctgtggcttccgacagtacagaccaagtacatggttcccgccgaggcgaaccgattcagcctgatgctctgggattcgatcgacaaggcttttcgctgtatccggcggcgggagccgggctgctgcatagacgccgacaagttactgacgtatatgacgctttatctggaagaaagatcatccgtcgggatgaagtgacgcaacttatgaatgaagagaggggctgtccgaacaattcgggcagccccaatgtcttcgggcggtcttttcgttttcggttcggggaatcggtcgaagcctttgcaaaatgatgatatacagtcggttttcctctttttgcgccggacgggcaacaaaaaaggagcctcggaaaaaggctcctttgtgcggataaaggtgctcctgcacatttgtaagcctaatgtatatcaacggtttgcaacggttttctatgctttattcccgcgtcgcctaccgtctttttgcatggtcttgcgcccgcctgcccgtttcgcctgcgccgtcgccgtatctccttgcatgacagtacaaatatagcgattttcggcgaaaaaaccaaatgcgaagacttttggagatgcaggcggatttttatcgtcaaattgagcattattcgtattgttaatattatgcattaatagttggttgtttgaatgaaattatgtgaatcgtatcaagctcgatttatgttcgatatcgattttataaatgaaaaaataatttgcgtcataagatgacataaataaacattatctttgtattcataatatagtcttagtcatcacttaaaactttacaatatggacaggctggggtatagtcagataaattttttgttcattctaactttaatacaaagagacgatggacaaaagaaacaaactttggaggagagaacaacagaaccgggtgtttaaagctcgcatggtttatcatgccgcttgcgggtgtggaatcaagaaagcggatggtaactggaatagacatcctcattggttcgagttggcaagggtgaaatggatgcagatctacaaaaaaacaggaacgccatgcagttgttggttgtgccgaggagagaagtatgatcgcaggggatatgtaaaggaaacattgcggattatagccgaagcatagacagattcgtatgcgtcactttgaaatttagtattgtcaatatgttgaataatttaatatttagagcctcataagtgtttaatcgactcgtagaaagttacgggtcaaaccttatgagatcatgagcagaagcaggaaacgaacacccgtcagcacgatcgcgtgttgcaagtcgcagaaaaaggacaagcagttatgtaaccgtctttttcgtagccgatccaaacgatttatccgggacggtaaggagctgccgcttcggcttcgggaagtaatgaatatttgggattttgccggtgacggcaaatgctattggggctatgattgcaagtatttcgagaagttgatgagaaagtagcagtacgctctcctttacttttgggtaagggagagcgaattgtatttgggtggctgtaaaataatcgcttcgacggattttcgatatttcaggcttattcgtatctttgtttctatggacagaggggagattatcatttaccagacggcagacggcgagacccgcttggacgttcgcatggagaacgacagcgtgtggctgacgcaggcgcagattgcgcatttgttcggagttgacagaacggttattgtcagacatgtcaacaacatttataagtcgtccgaattggagcgggacgtaacatgtgcaaaaattgcacatgttcagcatgaggggcaacggcaagtgcgacgtatgattccattttataacctcgatatgattctatcggtgggctatcgcgtcaattccaaaaatgccactcaatttcgtatctgggcaaataaggtcttgaaagagtatctaataaaaggctatgcagtcaatagccagtccaaggccgagcagttggaggagctgaaacaaaccgttcatctgctctcgaacgtgttgtcggcaaaggatgttacgaaatccgaggcaatcgggttgctgcgcgtgattacggactatacttacggtctcgatacgctcgaccgctacgattatcagcagttggaagtgtcggctactacgaccgaggagccgtttcatgcgacctatgaaaatgcgatggaggcgttacaggtgttacgcgacaagttcggaggcagcgagctgttcgcccacgagaaggacgagtcgttcaaaagcacgatgggcgcaatttaccagactttcggcgggcgggacctctatccgagcgttgaggagaaggcggctaatctgctctatctgacggttaaaaaccattcgttcagcgacggtaacaagcgtatcgccgctttcctgttcctttggttcttggaaaacaatcggattctttaccgtgctgacggttcgcgccttttggataacaatacactggtcgccctgacgctgatgattgccgagagccgcacggaggaaaaagacgtgatgacgaaggttgtggtgaatctgatcaataagaacaattgacacgataacagcgtgtcggatatcggaaaagtgatgaaacctatgaagcctagtcattttatgaaccgagttttattgtttgtattgttgctagtggtaggcaaaggtgctttgtcgcaggagcggatagatacactctactatagccgttcggggatgacggtgcgaaatccggtttttgccgattattatcgactggcgctttatcctgcggatgcggcggggctcaaaatgttcaaggatttttatatttcgggagaattgcggagagaagggcgttttcagacaatcgatacgcttgatgatcgccggacggtgtttgacggagatgttgtttcctatttcaagaatggtcgcatgtcggaaaaatcatattattcggaaggattgttggaaggcgaatatcggcaatacgacgagaatggaacgttgaaaacacgtgcgtcgtatgccggcggcgaattgtccgggatgtacgaggcatacaacggagacggctcctgccgaatggtggaatatcgtgcagggctgccggttcatgattattatttgctggcggacggcagcgggaacacgcttaaattccgcattgcggacgacatgccggtatgggaatctccggtcataacggagcgttcggtcgattatcgggacggtgtgccctgggaggtctatttcaaaaacggattgacgatcgccttgacggatgccatcgtccgggattacggcaagtggcaccgggtcgatctgattatctccaattgtatatttgtaattagttaattaaatttgaatagttaagacatcagagtatggaataagtccgatctctcattggttttctaaaccgggaattatgttctgaccccatactctttacatcagaatccggatagttcgtaaggtgtctgagcccgtattcgcaatgaaggaccaagatgtaagcgatgtcgttaaaaccaaaaaatgaacggccatgaggtacattggaatcgacgtgagcaaggctacattcgtggtagcttactcctccgacaaaggcggggagatccgtacttttaacaacacgaccgctggtatcagacagtttatcgggactctccccaaagacggcagtatccactgtgttatggaggcgacagggaattacagcgccttgctgctgtatatgctcaatgtcgccggaattactgtcagcatggagaatccgctgaaggtaaagaacttcgccaaagccttgctctctacggtcaagaccgataagagcgatgcacgactcattaccttgtacggagagaagatgaacccgcgtcctttcaaggtacagggagaggccatcctgcggctccgacagaaaagaaccgtcattcgccaacttactaagcagattaccgccatgtcgaaccttcgtggctctcttgcatgtctgcctgtcccggacaaaggtgcaactcataccgtagacgaaactatcaagttccttgaaaagaagcgtgacaggctccaggcggaactcacggatcttgtcgaagtggagttcagccgacaactcgcgctgctgacgaccatcaaagggataggcataacgcttgccacggcgctcatcatcactactggaggctttacctacttccaaaatgccaagcaggtgtcccggtatctcggaatttgtcccacttacgaacagtccggaacttcggtaaacatcaaagggcatatcaaccgaaacggagacgcatacactagaggacttctctatatcgccgcttggcctgccagtaggttcaatgcccaatgcaaagagacctatacgaggctcaggcaaaacggaaaatcgggaaaactcgctatgatcgctgtcgcaaacaagctcatcaggcaggcttttgctgttgtcgcgcacgataaagagtatatcgacggattcgtctccaacagaccttagtaggaaccattctccgatattattactctttttccgcattttttaatatagttcgtaattcattgacgccggtcgaattcaatccggagaccgatatgacggcctattccgtagacgaacacgatgtcgccaccgatctgcaggtctggtcttgcgatagctatctgaagaaagtgaaccgatcgcagacctgggccgctgttttgatgggcgtcagcgaaggaatggcttctgccggcgcagggtattcgacctccacgacgaccggttacagcagctacggcggttattcgtcttatacgactacgacttataatccctctgcagcctatcaggccaacatggcctcacagcagcggatcgctgatttcggtcaggccttgcaggacgaacaacaggtcaaaaagctgggatatttgaagaaaaacacgatatatcccggagaatccgtatccggatttgttcatgtagcatggattaaaggggagcgtgttgtgttcattatccggattgaaggtgccgaatacatttatgagtggggatttgacaagaaaaatgcgtttttattgaataagaacaactaagctgtatcattttttctaaaatttagttgaggaaataatatccgcaaggtcctgcaaatcgctatgtgagccttgcggatattgtttttaaggtttattcctttgcgggaaagcgaaaaaatgggaagattttgtacctttacctaaaatattctatacaatggcagcgatgaatacagccgacatcggctttgaaaaggaaatatggaaggcggcggataagatgcgcggaaatattgatgcatcggaatataaatccgttgtattgggacttattttcctgaaatacatctcggacaaattcgaagctaaatatcaacagcttgttgccgaaggagagggctttgaggaagacaaggatgagtatttgagtaataaaaatgagaagggtagttatgatccggttttctatgtccctgcggaagcccgttgggaagctattgccatccatgcacactctcctgaaattggaacgatcatcgacaatgcgatgcgggcaattgagaaggagaataagcgtctgaaagatattcttccgaaaaactttgcgcgtcccgagctcgacaaacgccgcttgggtgaagttgtcgatttgtttacaaatattcggatgcatgagcacggcgattcgaaggatattttgggtcgtgcttacgaatattgtctttcgaagtttgctgaggccgaaggaaaattggcaggtgaattttatactccggcttgtatcgttaagacgttggtgaacgtattacaaccttataaaggtcgtgtttacgatccttgctgcggttcgggtggtatgtttgtacagtctgcacaattcatcgagaaccactctggaaatatcaataatatatcagtctatggtcaggattccaatcctacgacatggaaaatggcgcagatgaacttggcgattcgcggtatcgaggccgatctcgggcgatataatgcggatacctttttcaatgattgccatccgactctgaaggccgatttcgtgatggccaatcctccgttcaatctgagcgattggggggcggataagctggcggatgatgtgcgttggaaatacggtacaccgcccaatggcaatgccaactttgcgtggattcagcatatcatccaccaccttgccccgacgggacgtgcgggcgttgtgctggccaacggctcgctgtcgagccagagtggcggtgagggcgagattcggcgtaaattggtagaggctgatttggtggattgtgttatcgctatgccgccgcagttgttctatactacacaaattcccgtgtcgatttggtttttcaataaaaacaagcaacaaaagggcaaaacgctctttatcgatgctcgcaacttaggtacaatggtaacgcgcaaactgcgcgaattgaccgatagtgacacggtcgatccgataaagcgcggcgatattcagcgcattgccgacacctataatgcctatgttgctggaaaattggagaatgaaaaaggattttgtgcggttacctctgtcgcagaaattgccaagcaggattttattctcacgcccggtcgctatgtgggcattgctgcgcaagaggaggacaccgaaccgtttgaggagaaaatgacacgcttgacgggcgagctttctggactatttgaaaagtcgcacgagctggaggcagagatcaaaaaacagttaggtagtattgggtataaattgtagcaaatatgggcttaattcttaatgacttaaaaaatgcatgtgaattagaacatgtatgtgactatgtaaataatcgcacaacgagtagtatgaattatatctctacggaaaatatgttacccaataaaggtggtataagtgaatctacaataataccgcctggaaccacaactgaatataaaatcggagatattttgatctctaatattcggccatatttccaaaaaatatggtgtgctgataggtgcggtgggtgctctgcggatgttttgtgtattcgtgcaaaagaaaatacagatagcaaatatttatactatctgttgagccagcaagcgtttttcgattacgtaatgtcgggagcaaaagggtgtaaaatgcctcgaggggacaaaaaacagattatgcaatggcctgtaaatatccccgcaatagatgtgcagaaaaaagttgtagctatattatcttctctcgataataagatcagactcaatcgacggataaatgataatttagaggagcaggccaaagcgttgtttaagtcgtggtttgtggatttcgatcgaaacgaatgggttcactgtgaattaggagatatcacacttattactgctggaggtgataggccttcaaaatatactaataaaaagactattgagtgtcatgttcctatatattctaatggaatagataatgaaggattatatggttatacaaatgttgcaaaaattcacgaggaaagtataactatttctgcaagaggaactataggttatgtctgtttgagattagaaccatatgttcctattgtccggctaatttcaataatccctaataaaaaagagttgtctgcaaaatatttatacttgtgggcattaactcagaatattacaggaacggggacgactcagcaacaattgactgttccgattttcagaaaaactccaatatcaataccctctgacactaaattgaagcaatttaactctattgctgatcctttatttagtcaaattgaatctaataaaaaagaaaacataaaattatccactctccgtgatacccttctacccaaactcatgtccggcgagctctccgtcgaggaggtttccttcgattagcttgctaaattatcatttatacgcttattggtctctattttttcgtcaattgaagaaagaatagagactattttttgttgagttttaatatcaggaattgatatatcttgttcctgaataaaactgttgaaatctaaattcttaatgccggttgtgccattctcataggggaacatagcatctttattgtacagataaagccagtaattaaaaagatattcaggttggatgcccgttgctgtgatggctttacagaagttagaacatatcaaaggcttactatatcgggataatattttatcggatattagcgcaatgcgccccgttgactgcgttggactcccgccggatatttcggtagtgtaaactgaactgtgtcacggctctgtttttattctttccctcttatttgtgtgcagatttcacatctgcatacaaataagaggagcctttcacaggcaaagttacataatcttgaacctatcaccaaattttatggcaagttgctgtgatatcagtgcccaattagacagtggcatagtccatttcccactaatgtctcgataggcaagatacacaagcttttcaagtgcggtgtctgacgggaacacacctttgttcttcgttactttacgcacctgacgatgatagccctcaaccgtattggttgtgtagataagtttgcggattgcaggagtatactgaaaatattccgtaagacgctcccagttgtcgcgccaggatttgattactatggggtacatctcaccccatttttcatcaaccatgtcaagctgtgctaatgcagaatccttgcttacagcaccatatacggtcttgagatccttcagaaactctttctgatgcttgcttcctacatacttgattgagttacggatttggtggactacacatagctgaacggaggtttccgggaatacactttggatggcatcagggaatcccttaagaccgtctacgcaacaaatcagaatatcacgtacaccacggttctgaaggtcggtcataacatcaagccagaagttagcaccctcactctcagatatatacataccaagaagatccttgtgaccagacttgtttacacctaggacattgtatattgcacgagtgactgcacgacccttatcgtcttttaccttgtagtgaatggcgtcaagccagcaaatggcatagacggggtcaagcatacgggacttccaggctgttatttcgggaataactcggtcggttatagcactgatggtttctgctgaaagggttgtgttaaactcacgctcaaagtacttgcttatatcacgagtgcttgtaccaagagcatacatgttgatgatttgatctgccataccttcagcaagaattgtctcacgtttcttaactgtctccggtttaaaagaaccgtcacggtcacgaggggtttcgactatcacctctccatactttgtctgtacggtcttgctcatcttgccgttacgacgattgccagaactgcagtcaacgctattaaggtgagcatccatctcaccttctaaggctgcgtttaggatacgttctagcataggagccaaagctccgtctttaccgaagagtgcttcaccgctacgcagctgctgggctgctttcttgtagtctatttccaaattggccatattataaaaactgtgttaaactattattattatagcctgacacagtttattttacactctcgatatttcaattattaaattattagcagataaaatctttgatgtcgcttttttattatggataaaacgttgtggcattttgccgacattgcctttgcaaagttcgggaatgtcagcccctctcacacataatacttctgttgtatagttctctgtgggggagcctttgccccaatcaccacttttgacttctgatattacatcctttattttgcaggttactcgtgtcatacctaatttatatatttccgatgtgagattttgacattgctttgattaaccattgcatagtgcattgtcgtgtcgattttgacgtgccccaatagcttttgtacctgttcgaccggcatccctttatcaatggccattgtagcaagtgttcggcggaatttatgcggatgaactttgtgaatcgaaactttgcggccgagttggcggagacgtaactctactccgctaattttaagccgattatgcggcttggcaatggatacgaagagtgccggattgtcatctgtccggctttcgaggtattgtttcagatgaatttttgtgcgggcgttgaaatagacttcccgttctttgttgcctttaccgaaaacgacgcactcgcgttcgtgaaagtctatatcttctcgattaatttttaccagttcgccgacgcggataccggtagacgatagcatgtctatgattgccagatctcgtatatgggtgcagttgtcacgcaaaatttcaagattttcatcggatagcacctctttaattaaagagccggttttaactttatggatgcgtctcaccgggcttttaagaatataatcttcgtcttcgagccatgcgaaaaagcttgagaaaattctgcggatattgtctatggtaacttttgacgattggttattcgattggtatgatgcaagataacatcgtagatcggtcgttgttatatcgacgatattcttgtcgatctgccgtaacatatattcaatagtcgaagcataatattttaatgttttctcagagcatccctcgacgcgtttggctgatataaatagcgtttgcagttgagaattagccttgactcgcgcttcgctatccggaagcttttctgcgatgacaatattttgcaatgtgcgattcagcacgttacataagatgctcatttgatctgccgtaatgacggtacgcatcgcggttttaatttcgtcaattagtttttctttcatggctgcgtttgtattattgaaattgataaagttacgcagtccattgaaatacacacaaagataaccgataaatgataatttagaggagcaggccaaagcgctgtttaatcattactttattcaaaatacagagaatttaggagaatggcaagacggggttttgactgacattgcccaataccttaatggattggctatgcaaaaatatccagcgatgcctaatgaggcaggattgccagttttaaagattaaagaacttggacaaggacaatgtgacaccaacagtgatcgttgctcatctttaataaaacctgaatatataatttctgatggaaccattatattttcttggtcaggaaccctacttgtagatatttggtgtggtggaaaatgtgggctcaaccaacatttatttaaggtatcttcggcaaagtatcctcaatggtttgttttttattggacaaagcatcatttgaataaatttattcgcattgcgaaagacaaagcggttactatggggcatatcaaacgatgtgatttagaaatatcaaaagtaaaaatcccaagtaagcaggctttggttaatttagataagttattttctcccatctttaatagaatggttacttgtcgaattgaaaataggaaattatcatctctccgcgatacccttctacccaaactcatgtccggtgagatctccgttgaggaggtttccctcgattagcttgctaaattatcatttatcaaagttactattgtaatttctatttttgttatatttgtattaaactgggatttctaatggaattagatcttaatattgattcaaatggcaatgtaatcgtcaatacattgtcggaatatgttgcatatatttctcagttgcaagctgccaatgaaggtagcaatgagcgattctttttcaggggccaatccaataaaaattgggatgtgcgcccgtgtttatttagagagaataacctgacgattgaatccgatattatatccgaggcttgtgctcgtgctccttttgaatttggcggccgaagtgcatttgaacgactgacaaaattacaacattatggactgccaaccagaatgttggatgtaacgctaaatcctttagtcgcgttgtattttgcgtgtgcgaaatgtgaagataaagaaaactacgacaagaattataaagaatctgatactattgatgtcgactccgatcattcatttgataatgaatatgatgtcgatggggctgtttattatagacgggcttatggacataagcataattcagatgatattgatctgttggcccgaatcgcggaaatggatttcagcggagatattgtattgcatcaattggtcgagaaattaggactacgcagtcaaataaaacaagccgaggattttgaggaactggcaaaggtgatgcaaaatgcttactttgttatatcgacattcaacaatgaacgtttgattcggcagagcggagcttttttgctttctggtagcattaatattcaactcaataaatctgattacggcgccagtcggatcgagaagagcagttgttctttaaatagccagtttgcgagcgaaaggataatcataccggccggaagcaaggaaagccttttagaagaattgaatttctacaatataaaccaaggggctttatttccggagttggagcatcagatggcatatatcaaatatagtatgtgtaaatctaatgtcagaagcgcttcatcttttgaaaagatagattttgatgcaataaaagctgaagaatctaaggaaagtgttgagatagctgaatccgtagtgagagaagagttagttgataaggctatttatgatatcatatcacaatatatttcagatgatgctataaaacagaatgttcttcgaattattacacggcaaaccgaatatatagattgggccaataaggaagcgaccattagtgatttgaggcgtaaaatcaaacgaagcctgtctttacaatctattagttctgatgtcgcaacgcaatctgcgcgtaatatggtatcacaacttgttaacttgtatgtgaaaaaataacaattatatgcacttcaccgaagatgattttgaaaacgctattctcgagttgtttcgagagcaattaggctatgattatgtgtacggtcccaatgtaatgcgcgactatgcagaaccgctttacgtggaggtgctggaggctgtgttgccgcagatcaatcgtggactgccacaggccgctattgacgaagctatggtgaaaattcggacctatgagggcggaacgttggtacagaagaatgaattgttcacggattatttgcaaaatggcgtagctgtcaattatttcgatggccgcgagcaatgttccgcaaatgtccggcttgtcgattacgattcaccgttacataatcggtttacgatcgctaatcaatggacggtcgatgggcactcggtaaggcgtgcggatatgatcgtatttgtcaatggattgccgctggtggtggtcgaactcaaatcgccatcgcgtgagaatacagacgtgtcggaagcttatgcacaattgcgtaactatatgcaggagattccgtcactctttatctataacgctttttgtgtgatgagcgatcaggcgatgactaaggcggggacgatcacagcgggtgaagaccgttttatgcagtggaaaacggtagatgggagttatgaagatacccatagcgcgaatttcgatgtgcttttcgcgggaatgttcgaaaaaacgcggtttgttgaattgttgcggaattttgtttgttattcgaaagacggtaaacaggatattaagatattaagtgcctatcatcagttttatgccgtacacaaggctgtgctttcgacggttaaagcagctgagacagatggtcggggtggcgtgttttggcatacgcagggcagcggaaagtcattgtcgatggtctttttcgccaagcagttgcagcaggcgatgtcgtcgccgactatcgtcgtgctgacagaccgtaacgatttggacggtcagttgtaccggcagttcgcttgttgcagggattttttgcgtcagacacccgtgcaggccgaaagtcgggctcatcttcgggaattattggcgggacgcgaagcgaacggtatctttttctcgacgatgcagaaattcgaagagagcgaagaacctctttcgacgcgacgaaatatagttgttatggccgacgaggcgcatcgcagtcaatacggattggaggagagggtcaggatggttacggatgctgacggggtaacgcaagccaaagttgtaatcggcgcggcgcgtctggtgcgtaatgcgttgccgaatgctacctatatcgggtttaccggaacgcctatttcgcaaaaagatcggtcgacacgcgaagtgtttggagattacatcgacgtgtacgatatgacgcagtcggtggaggacggtgcgacacggccggtattttacgagagccgtgtaatcaatctgaaactcgacgagcagtccttgcggcgtattgatgcggagtatgatgcgatggctgaggaggcggaagagtatgtcattgagaaaagcaagcgtgaattggggcggctcgactcgatccttggagctgacgcgacggtggcatcattgtgcgaggacatcgtaaaacactatgaggaattccggcaatacgagcagacgggtaaggcgatgatagtagcctattcgcggccaatagcgatcaagatttaccgtcggattctcgaaatgcgtccggtgtggagtgacaagctggctgttgtgatgacttccggtaataaagatccggaagactggcgggcgattattggaaatgattcccacaagaaagagttggagaagcggttcaaagacaacgatagctcgttgaaaatcgtcatcgtagttgatatgtggcttacgggtttcgacgtaccttcgctttcgacgatgtatgtctataaaccgatgtccggacacaatctaatgcaggctattgctcgtgtgaatcgtgtgtttggggataaacaaggtggtttggttgtggattatgtgggtatcgcttcggcgttgaagacggcgatgaacgattatacataccgtgaccgcaaaaattatggtgatacggatgtggctaaaaccgcctatccggagtttcagaagaaactggacgtttgccgtgatctgatgtatggattcgattatggtgctttcttcggtaagtctgatttggagcgggcgaaagccatcagcggaggtgtcgatttcatgcagtcccccgagcggatggaaacgaaaaaactctatatcaaagaggcgctgctgctgcggcaggcattgtcgctttgtcagagtttactgaattatgagcaacgtatcgaagctgcctattttgaggcggttcgcacattactgacgcgcgtggaagccaagggcaagatttcgttccgtgagattaacgggcgtattaatgaattgctcaagcagagtatcaagagcgaaggggtaattaatcttttctccgatatcaaggaggagttctctttgttcgattcgaaattcctggaagaggttgcccggatgaaggaacggaacttcgccgtagaattattgcgtaggttgattgcagagcaggtacaactatatcagcgaacgaatacggtacgagccgagaagttttcggaaattctggccgatgccatgagccgctatttgaaagggatgctgacgaacgaagaggttatcgaagaactgctgaaaatagcccgtgagatcgttcacggcgaaaaggccggcaagtcgcttaatctgaacagcgaagaacttgccttttatgatgcgttgaccaagcctgaggctgtaaaagatttctattccaacgatcagttggtcgctattacgcgagagttgacagatgcgcttcggcgaaacaagacgattgactggaatatgaaggagagtgctcgtgccggaatgcggcgtattgtcaaacgattgttgaaaaagtataattatccgcctgctgggcaggaagatgctttgaatacgattatggagcagtgtaagaagtggaacgaaaataattgaatgagatagctatgggtaagttggaagagtcagtcgtataatgattttgcaagatatagtaataggcagtgtccataattttgtgttacgctcccctcgatcccggaatatcgtcatctctttccgccggcagggaattaaatgccggagatgaaaatccgcaaggccatgcgaatcgcccgaggggcgagccttgcggatttccatccccggcgttttgctggtcgcatgtagatttgcagcgtgatgtaatcacaggtaatttcgatatggagtcgcagtgaaccggggcttgtcgtaagctttgaggcttggcggtagatttggactgcgactccattaaccagagagaatggctgtttagaattgtaggtttgaagacctggtacatgtgatagcatacgactctcacaaaactaacaagttatgcactatttgtattatgtgggtctggatgtgtcgaaagagactttcgatgcgtctttggtcgccttcgaggatgcaaacgagatggctcaccgcaaattcgccaactcccgaaaagggatctgctcgtgtctgcactgggttgagaagcggcatggtattcggctcgacgatgtgattttctgcgccgaggatatggggagctacatatccgagatggcggtttgtgcttccgacaggacgctgaatttcaatttttcactgatctcgccgttggtaatcaagtattcgatgggtattgcccgtggcaaaacagacagagtggatgcccggcgtatcgccgagtatgcgatcactcactatcggaagatagccctttatctgccggcagagaaggaactgtgtcagttgcgcacatggctgatcttaagggctcatctggcaaaacaacgtgtagcgaaactggtgttgctcgaaaaattagactacaaagagaaattcgcggatgtatctattcaacgttccatgctccaggaggagatcgcgtatgcagaaactcatatgaaaaccatcgaacgggaaatgaaggaactgatagccgccgacagcaacatttgccggaactacaagctgctgaccagcatcaaaggtgtagggccgatcacggccattgtgatgctctgttcgacgcttaatttcaccaaaatcacagaccaccgcaagtttgcctgctattgcgggctggctccgttcgaacatagctccggcacaagcgttcgcgggggatgccacacatcgagcatggcgaatcgagacattaaagtacaactgaaccgcagtgcactgattgccatcaggtgtgatccgcaactaaaggcatattacgaacgcaaagtggctgaaggtaaacataaattcagcgtcctgaatgctgtgagggccaaaatcgccgccagatgctttgccgtcgtaaggcgtggaacaccatatgtagcgttgcagatataatccggcatacatatctgccattcgataagattttgagatcattcaaaatctcaaaatcttattgtcggaacagtccgtctaattggggccgaacctactcataattaatgtattgtcatttccgtactccgcaaattaacgattctgactatgggatgcaaggctatacaagcgcttcgcggccttgcatcccatagccagaatcattttgctaaacgctacgacaaaaaatgacaatttccgggcatgaaactttttgcagcttttatttggttttatcttagaattctaccgtcggaataggcggctttctgcggcccggacgctaccctgcggactgcccctccaatagccataatccacgacacgcacgtcatataccccaataggcataacaaccgctcccgacgtttcgttcagctgtccgttataattcgcattgtctgttcaaaacggtcgtctgttgttcttcttctcgtggagataattcagctcaccgctgtaaatgtccatgacaaatcgcagcatattgtcgaccaaggccgtaagccttgtactctcattccctaacaggtggagtatttccgatactttgtgcttggttcgggtactgacatagatcgcagagcggttgcggcaatccaccggagcgaagaacgtgcgttcaaaatccggtagcgtgagctttttccgacggaaaccggaatgttcttttacggtactcgcagtggagtctatgcctgttttctcagcagtcggtgccgatgctccggataccgtttccgatgtgttttcctcaagagcgttcgtatcttcctcttccggctcgggaatcctgcggacgacttccgagtccaaaggggcttgtccggcgatcatctgacgcatcagttcctcgtcgacttcgatacggggacgcttagcaggattgggtgcggggttgtctttttcctttaatgaatccatggtgcaacgtttttgagattgattgtcagccatacgagcatagagtatgtatgtctggtttattgggttaaaccattcaaaataccgttttctatttcatgcagtttatatcgggataatgaacgcaataagaaaatcgacctttcatgctgcaagatacaactgggtgaaatacctcggttccgatgtccgctccagaccgctccagtccgtaccgagggtttgttttggcgctgtcccgtcctgaaaaaggtttacagaaaagagtaaatcttatgcagcaaacaacgaattcagacttatcacgtcattatttaccgcgtcagttgcgtcatctgattttacaggagtatttgagcggagtcaagacggctcgccaactctccgaagaacatggtattcccatgtctacgattcataagatgggtcagcggtggaaagcgaaaaatagttgtagctttgtgagtacccctaatccttatccgatcatgtcccgcgttacgagtgaagaagccagtgaattattatccgagaacaaagcccttcggcggcgcttggaagaggctttattacgtctggaaggctatgagatcatgggagatatcctccaagaagaatacggtatcgacctgctaaaaaaatccgcagccggacagtccagcgtctcaaagaaagacacacagcaatgagcctgtcgtttctgtgcgggttgttcggctatacccgtcaggcctattataaacatttacggcgtaatagggaaggatctttgtccgacacccttcttttggagcgggtgggttactaccggaaactgatgcccaggctcggcggtcgtaaactgtggcatttgctgcaacaagacggatttccggtcagtcgggatcggttatttacgctgctttcggaaaacaatcttctggtcaaacgtcggaagaaatacagcgttacgacctgctcgcggcactggatgcgtaaatatccgaatctgatccggggtttcgacctcgagcggccgcatcgtttatgggtcggagatattacgtacatttctttgaaagaaggatttgcatatctggctttgataacggatgcctattccaaacggatcgtaggctataatctgaatacgacattggaacgggacggagcgctccgtgcactgaggatggccatagaccagactccgcagcaaaaacggcaagggttaatccatcattcggacagaggatgccaatattgttcgaaagaatatgtgaaattgctgaccgataatgggattcgcatcagcatgactgaaaagggcgatccgtatgagaatgccgttgccgaacgggtgaacggtattctgaagagcgaatggatcgacgaggaatgttttgaaagttttcaggcagcaaaagaacgcatcgatgagatcgttatcctttataattcattcagacctcatgccagctgcgattggcttacgcccttggaagcggaacttagaaccgggaaactcaaacatcattggggccgaaagacggttgttcggaaggcatatgtaaacttatatcaggacaatattttttgaaccaaaatgcttatctttaattatcaatcactgtaaacctttttcaggacgggacatctccagacggttgtaatattgcaccgggaaagacccgccctcggaggcttttcaaagttttcacaaaaaattttccgccgcggattttgttatcgccagataacagcgagctgtacctttgtatgccgaaaaatttttcggcatacaaaggtgctcgctctgcgaggccgggtggcgttcccgagtcacgccacttaaactaccagcttgatgacaaccacgaaaaagaggatcggacgcccgacaacgacagatcccagagtccacaggtataatttcaaactcaccaccgaagagaatatccgctttaagcagatgctttgtgaggcaggattggagcataaccgtagccgttttatcgtcaaaaggctctttgccgaggagtttgtcgtcatcaaacgcgatccgtcgaagacgcaattcgtcgcccggctgaatgatttttatttccaattccagaaacttgcgaacaactacaaccagattgtaaaggctgtcaattcgcacttttccaacgttgctatcccgcatcagatcgctgcattggagcaacggacccgcgagctgaaagccctgagtatcgagattctcaacctcgcaaaacaggctaaggaatggttgcgaatataagatcgggctcctcgcccggcggagccttgtactacaacaaggagaaagtggataagaatgaggccgaagtgctcctctggcagaagatgctcgaacccttcaataaacacgggcgaatggatatcgatgcctgcatggagagcttccggccctacctcgaagctaacagaaggacgaccaatacggtcttccatgtctcgctgaatccttcgccggaagacagactgacagacgaacggctccgggacattgcccgcgagtacatggagcgcatgggttacggcgaacagccctatatcgttttcaagcacaaggacatttccagagagcatctccatatcgtgtcgctgcgggtcgatgagcagggccgcaaactcccgcacgatttcgaggcccggcgctcgatggaaattctgcgtgatttggagcggaaatacggtctgcatccgagtatcaaaggcgaggaacaagcagacaggctcggcttgcgcaaagtaaactataaagagggcaatgtcaaacagcagatatcgtccgtcgtgcggtcgtgcttgtgcaattacaaatgttcgtcctacggagagtttcgcaccctgctggaacgtttcaatgtctcagttgaagaacgtacgggaaccatcgacggcagggattatgccggagtgatctacgggccctgaccgatgacggctatggcatcggtactccgtttaaatcgagccgtatcggccgggatgtcggctacaaggctcttcaaaagtattacgagcggtcgaagagtgcgctgaagcaggacggaacgctcgaccgacttcggcaaacagtcaaagacgccatgagcccacacaatacacgggacgagttccggcgactgctcaaagcggagaatatcgacacgattttccgcattaacccggtcggcagaatctatggtgtgactttcattgaccataacgacggcatcgttgcccgcaggtcggtactgggaaaagagttttcggcaaatgttttcaatgaactctatccggcaccgaaaaacgacaagcaggttccagaacaacacacagcaccgtaacacgaaatacaaaaccatatcgccaatcctatttctggcattgtcgatacgctattggacctgaccgacacgcaggcctatgaagaacagcagcggcagatgcaacgatttcgaaagaggaggtgacatttttttgatatgaagactgatacttactgtacgaaggatctttcgcgggtgggaagatgtttgattcataggacattatgttgcttttcagataagaagtatatcgcttatagagtaaaaaacgtaattgtaaacgaggtttcggtgtccaaagcgttacctcgttgacttttgcttagaaattgtgtattgtgttgaattagatcatgttaatgcgttgttcgtcttggcggccgactctgccgaaattatttttgtaaccctcaagaggcgtgtgcagtatgttgacgctgtggcatgttgtcagacaagacgaactgtttatagagtgattctctggccgactataatatttataacaaaagtcctatgttcgtatataggacttttgtcattttgtacattcaagcgtatagatgtcatccggaaatgtcgcaattcggtttccgttcaggtattcagccgtgcatggtctgcgaggaacttctccagcccgctgttcgtcatcggatgtctgagcaacccttcgattgccgcaagggggcatgtcgccacatcggctcccgcatcgaggcactggataatatgctgcgtatgacggatcgaagcggccagcacctgcgttttgtaaccataggtgcggtagaccttcacgatgtgggctaccaatgccacgccgtcttcggagatgtcgtcgagacgtcccacgaacggagacacgtaggtcgctccggcctttgcggcgagcaacgcctgtcccacggagaataccagcgtgcagttcgtccggatatccttggcggcaaaatattttacggcccggattcctgcggccgtgcagggcagtttcacgacgatgcggggatgcagcgccgccagcgcctcaccctctcgcaccattccttcgaagtctgtggctatgacctcggcgctcacgtctgcagatttcaacataatgacggttgcagttttccgtaccccggatgttctctttggccatcagcgatgggttggtcgttacgccgtccaggacgcccagttcatgcgccttgcggatttgttccagattggccgtgtcgataaagaatttcatggctcaaatagtttttacggtttcttaaagatacgaagaaaattccagactacagaaatcgtagagcgaataacgttagagtgttgtcagttatgatctatcagctttgctcggttgtgggattcgtaaaggaggccgtcaaaaaaaaatcatgttgttctgccaagtataggtgtcggtgcaactgcctcggtatgcgttggcagagtagccttttaattgacgctaaaagaggtattttacagaatacttgactttaaagcatattaaaatttttggttttgatatgctttgatgagtttttgtgctatctttggatattcatttaatatagaatttgcctcttctttgaaaaaaagaaaggtagataagcattgtaaatacccgggctaaatttttactcgcagatgataaaaaaactgttttttacattgctttgcactgctgtctgccgaacgatatcggcacaggtggttgatccttatgtcccggcgcccgaaaaccttcgggctcggacggagtttcaggatgccaaattcggcattttccttcattgggggctctactcgctgctcggcacgggcgaatggactatgaccaaccgcaatatcaattatcaggagtacgccaagctggccaatgcgttttatccacatgatttcgatgccgcggagtgggtctcggccatcaaatcctcgggtgcggggtacgtctgcttcacgacgcgccaccacgacggcttttcgatgtgggacaccgcgcagacggactacgacatcgtggacgccacgccgtataaacaggatgtcgtgaaagcgctctccgacgagtgctcccgtcagggcatccgcctgcacctctattattcgctgatcgactggtaccgcgacgactgcccgcgcgggcggacggggcttgggacggggcgtcccggcacggcgatcagctacgagcgttactacgattttatgaaacgccagctcacggaactgctgacgggttacggttcggtgggcgccgtgtggttcgacggggtgtgggatcaggatcagaacccggatttcgactggaaactccgcgggctgtacgaccatatccatgccatcaggccggcctgtctggtgggtaacaaccaccacctggttccgttcgaaggcgaggacatccagattttcgaacgcgaccttccgggcgagaacaccgccggactttcggggcaggagatcggccgcctgccgctcgaaacgtgccagacgatgaacggcatgtggggctacaagatcaccgacctcgactacaaatcgtcgaagacgctgatccactacctcgtgcgggctgcgggccgcaacggaaacctgctgctcaacatcggtccccaacccgacggaaaactgcctgcgacggccgtcgaacggctgcgggagatgggcgaatggctcgcccggtacggcgaaagcatctacggaacccgcggcggcgacatcccgccccacgactggggcgtgacgacgcgcaagggcgacaaactttacgtgcatgtgctcgatttgcaggacgatgcgctgtacctgccgcttgcggaaaaagtcggggaagcccggtgcctgaacaacggcgagcgggtgaagttcgacacgctccggggaaaagggatcgtcctgaatctggagcatgttcccgaggataccgaccgaatcatagaactcactttacgatgaaaaaaacgacacagctattcgccggcctgcttatgctcacgggcgtgttgtcggcgtgctccccggccggcaacgagggtttcatgcggcgcgtggagaccgatttccggcacaaacaggagctgctcccccggggcgatctgttcgggatattcgacgaaccgatgacgccgcaggaacgcgatgcaatgacgtttctctatgcctatatgcccgtgggggacattaccgactatctgggcgatttttatctggaaaacgtgcgctgtgcgctgtctgtccggcaggagatgccttggggcaggagcgtctccgacgagttgttccggcatttcgtgctgcccgtgcgggtcaacaacgagtgtctcgatgattcgcgccgggtatttcacgatgaactcaaaccccgcgtcgaggggctgtcgatgtatgacgccatcctcgaagtgaaccactggtgtcacgagaaggccaactaccagccgtcggatgcgcgaactagttcgccgctggccaccgtgcgcacggcttacggccgctgcggcgaggagtccacgctgctcgttgcggccctgcggtcggtgggcatcccggcccggcaggtctacacgccccgctgggcgcacaccgacgacaaccacgcctgggtagaggcctgggccgacggacggtggcatttcctcggggcctgcgagccggaaccggtgctcgacctggggtggttcaacgccccggccagccgcgggatgctgatgcataccaaggtcttcggctattacgacggttcggaggaggtgatgaaaaccacggccaactacaccgagatcaatgtgatctcgaactatgccgcgtgcgccccgctcaccgtgacggtcaccgacacggcgggcagtcccgtggagggtgcgaccgtggagttcaaactttacaattacgccgagttctacaccgtatcgcgcaaaacgaccgacgtccgggggcgggcgtcgctgtcggcgggtctgggcgatatgcttgtcacggctgtctgtgatggccggtttggggttcggaaggtttctttcgggagggagacggaggcgacggtggtgctggagcatgcgatcggcgacgaattctccttccccgtcgacatcgttcctccggccgagagcgcgaatttgccggaggtgacggccgctcagcgtgcggagaacgaccgtcgcttcaaccgcgaagactccatccgcaacgcctatatcgccacgttcccggcgaaacccgccgttgcggagtttgcacgttctgtcggcatgaagccggacgatgtggccggatttatcgccgcttcgagaggcaatcacgccgaaattatggatttcctgcgcggcgcgagccggaaaggatgcaccgggcgggcgctgcaactgctcgccacgctgtcggaaaaggatctgcgcgatacgccgtcggcggtgctcgcggatcatctttataatacggacaagaatgccgacgccgcgaccgtgctggccccgcgtgtggccgatgagatgctcacgccctaccggtcgttcctgcagcgggaaattccggccgccgatgccgccgcgttccgccgtgacccgcagcgtctggtggcgtggtgccgcgacagcttgaccctgcgtccggaactctgcaccgtctccacgaccatctcgcccgaaggcgtgtggcgtagccggacggccgacaaactctcgcgggctatcttcttcgttgccgcggctcgttcgctcggcatcccggcgtggatcgaccgcgtgacgggcaacctcttctaccgccatgccgggaaggatgtgcccgtcgatttcgacgcggccgggaaccgggaactggagaccgggcggctgcaattgaactatgcgccgattccgcgtctcgacgatccggagtatttccggcacttctccctttcgcgcttcgacgggcagtcgttctccctgctgaactatcctgatttcgagcggtggagcgagctgttccgggctcccgccgatctggaaaccggttattatatgcttgtgacgggcagccggctcgccagcggcagcgtgctggggaacgtgtcgttcttcaacgtccgtccggacagtacgaccgaaacgaacctgacgatgcgcgacaattcggaggcggttcgcgtgatcgggagtttcgattcggagtcgaaattcactgacgccgcgacgggagccgaaacgtcggtcctcacgactgcgggacgtggttatttcgtgatcggattgctgtgcgtcggacaggagcctacagatcatgcgctgaaggacatcgcggccaaagccgcggagcttgaagcgtggggacgctcgctgatcctgctcttccccgacgagggggcgtaccggaaatacacggcgtcgcccgcggccccgctgccggcgaccgtcacctttggcatcgaccgcgacggctcggttcgcaggcggattctcgaagcgatgcagctgccggggaacgtttcgcttccggtctttctgatcggcgatacgttcaaccgtgtcgtgttcgaatcccacggctatacgattggcctcggcgaccgtcttttgtacaccatacaccaattatgaccggaatttatgacgactgaactttgcgcctatacctgcgatgcgtgcgatatagcccggcggacaggcgtcacgcgcatcgagctttgtgccgcgcccttcgaagggggtacgaccccttccgccgggctgatccgctacgcccggagtctaccgggcctgcggctgagcgtgatgatacgccctcggggcggggatttttgctatacggatgccgaaacggcgctgatggccgaagagattcgcttcgcccgtgcctgcggagccgacggggtggtcctcggcgtgctgacccccgacggagaggtggacgagacgcgcacggcgcagcttgtccgcgaggctgaggggatggaggtgacgttccaccgcgcgttcgacatgacgcgcgatccccggcaggcgctcgaagcggtcatccgcaccggatgccgccgggtgctcacctccggaggccgcaatacggcgcaggagggtgtcgggacgctgcgagccttggcggcgcaggcggccggccgcatcgaaatcatggccggaagcggcgtcaatccgtcgaacgcccgcctgctggccgccacaggggtcgatgccctgcacttcagcgcccgccgggaacgcgaaagcggtatgcgcttccgtaatccgcaggtctcgatgggcgggtgcgccggcgttcccgaatacaccctgaccgatgccgacgaagcattcgtccggcaactgttggccaagctggaataacaacgattgatttcagctcggagggtgtggtgctcggatgtggcagccagacggttgtcactgtgtatatttcaccccgactatcgggataaggtaatgtgaggtttgcaggacgcgggcgtggtatatccactcatctggaaagagatcatatttatatatagtatattttattccatccttgtttttggtttggcggagcagtttcgaagcggttgccctgcccgatttcgccgtcggtctgaagtgcgaatctgttcttaaaatgcgcattttgcaagacttttttatgcatttagagcgtaattgctgatgatttttttgcgaaaaattaattaggataaaatctttttattatttttgcgacaaagagaatcctctttcctcgtcaaattgcgagggggggggatttttccttggcgccgttctcgtgtcaagtcgataaaatcccgaaaactcgataagtaatttttctggaatccgttcagggtttcattttgtagattgtatcgactgttttaagtatggcatttcattatgcttatcacatccgaaagccaaaccgggaagccggttcattaaatctcatcctatgaaaaagttgtacctatcctttctggccatgctttgcatggcaggagcgtccgtactgaattcatgttcggacgacgattccacttcatccggcaaccccgacatgccagaaagcgggaatgccctgatctgcaacggtgtcgtacgggaaatcaaatccgccgtctactcggtcgagacacccggaaacggcgaaaaggcagatgcttcggaagctgcctccgtctatacgatctatctctcgccgacggcagggcttgtggatgtggacggcatgctgatcgccgacgatgccgtcaaaattaccgtcaaacaaccttccggagccgtcgattttgcggttgccggcaacggaatcgcctatggggagatcgacgtaaactcctcgaacgtcggagaagcctcgaaagcggatctctcggtcgagttcctctcggcccgcgtcgctcgtatttccgccgaaatcgaaaccggcggaaaaacgctgacggttgcctattacggactgtgcaagaattccgacgcttcggaggtgggagatgacgcagacaaggtgttgctggataaagttccgctgtcgtggtacctcggcccggtcaagggcgtggagtcgcacaactattatatggccttcacggatgccgagcataccgtatccaaagggcgggtgacgctcaaagaggcgggttaccttttcgtggccgacctctatgcggttccgggcgaagatgcctacacgcttcccgagggtgaatatatggccagccagctcaacgaggatcacacgttcacgtcccaatataccggtgttcagtatatcgacgccgaaggcaataagacccagttgtcgctggtttcgggagagccgttgaaagtctcccgcgagggtgacgtctggagcgtttcgcttcgtttcgtcgatacggacggttccgaaaagagcatcgtctacgagggacagctccagatcgtcgatcagccggaggacggcggcttctacctgccgcagatcggacgcgacgtggaagtggtcggattcagcgccaccgcgacctattacggcaacatgctcgaagcaggtaccggcatgatgcagatcaacatttacgacgaaacctacgacacggaggaggggcagggcggtctcgccgctgcgctcgtcgtattcaacgacctgttcggcaatccgaaggaagccgtgatcaagccccacgaatatctggccaacacctcgttccaatgggggtcgtggatgcccgccgtggaaattccgatggaggggctggtattcccgctcggcacttatgtccagttggacgacggaacctctttcggacaattttcctacggaaaggagggcatcatcaagatcgaggccgccggtacggcccaaggcgaagacggcaaaatagaaccggtatacaagatcgagttcaaccttacctcgaaggacggctttaccctcaagggctcgtacaccggagtcattccgatcaccgacgcatccgacgacaagtccgatgacgacggcacctcgacgctcgagcgtgactacgacatggatctgtcgaagatcaaaaaggcgcattactatacttcggatcaggtctatatccaaggcatcggctacaaaccgatcagttcctacggatgcggtctgcaattcatcaatatcggtatcgaatgggtaggagaccatctcgaagacttcgtggatcgcgagccgggcggtgacatcgtccgtgtggaacttaccaccgagccgggcaaggagaacgaaatcactccgggaacctacgaggtgaccgaacagcgctggacggcatacatcaaacccggcgtcatgatgcgcggcattatgctggacggcggtctgcatggcagccggtggatgcaccagacttattcgatgtggggagatgacaacaagatcttcgaatacatggacggacacgccctgctctacgacggtcaggttacgatcaccaaggtcgagggcgaaggcaaggagaactggtaccggttcgaggtcgacggcatctgcgtgcgcaagcatcatgtgcgcggaacgtgggaaggccctgtcgtaagccaaacggggcgtgctgcggccgaaaaggatcatctcgaaccgcccagactgcttcgccgcctgccggctccgtcggttccgatgagccgtctggccgaagaactgccgggcatcatgttccgcaaggccggaatgaccgaatgacaacagaaaaaccggatagcgcggggttttcccgaaccccgcgctattaaaaacaatcgttatgaaaaactcgacccattacagactgcgcgcgctggcgtgcgcgttgctcgcatcggcagccatgctgggtgcatgcgatgacgacgatcccaacgacgaccccgaccccgggaagaagcctcctgtaactctgaccgatcaaatccagtacgacggaggcgatctcgtcggcatcaagtcggcaatctatgtcgctgaagaagacggcagccacaccttttatctctcgccgaccgaggggctgatcaatgccgagcagatgaaacaggccgacgattatctgcgcgtgatggtggagagccccaagggcaccgtgaacacggcctccgatccgttcgaaatcgaatacaaggatatttcggtgaaaaagacgacgatgaacgacgtcgcgagcgtagaactctccgccgatctggtgacggaaacccggctcaatctctatacctacgtcgaattgaagagcggcaagacgctgatcgcccgttaccagaatacctgtacggaagagcgtgacgtcgaactgacgaaccaatacgagatcgacaatcggatcgccgccgtcggaagcgtcgtcgagtggcgcaatgtccgcgaaggcaaccgccgcttctgcctctacgagcaagagggcctggccgctcccgaggagggggctgcgggcgtggagattctgcttgccgaggagctgttcggaacggaggaaatcgaccttgcgacagctgatcccgcgaaggtgcagattcgctgcggtgaattcgcaacgggcgccgggacgaccggaacgctgacggcgaagtacctgacggataaattcggcacgatcgaggggctcatcgtcgcgcttgacgcttcgaaagacgggaagcgcctgcgtgccgcctacgaaggcacgttcgccggaggctatgcggccaccaatacgatcaaggtgacggagccggcagccggaggcgaggctgcggccgcagccgaggccccgatcgccgcgctcttctcgcaggagccgcaggtcggcagctacgtattcgctttgggcgatgccgaaacggccgcagccccggctgatcttgccaaaggtcattgggctgcgtatgtgcgggtgctggcggccaagttcgacggcgtgatcgacgttgcggcgcagacctccgattactggttccggctctacgaccacaagacctatcagacctactacggcgaggatgcgggactgaccggtacgatcgagacccatcccaatcccgctggcggcaaggagatttatctgcgggtaaatctgacgctgaaaaacggcatcggggtcgaagccgaatactacggtgtgccgacggctgcgacggccgacgcaatggatgaagaaacattgaagcccgtcaaaccgttcgagccctatatcaaattcctggacaaggataacaaggacatgctgtattggcccgttacggcgatggaggtgcggcacgacccggcttatcgggatagttatatcggcgatctgctatcgggatattgcttctatttccggaatgctttcaccgagagtatcgatgcggataatactactccgatgtttttcctgccggacagctacctcgaccatgaaggagagatcgacctgcctgcggaaggcacgaattgcaaatggaacctcaggttccagtatatgtatctgtcctcatataacgggtacggatattccgacaaggctaagtactgcatgcggtgtcccgagaaggcggcagtgaccgtcaagcaggagaacaagaagtggatcttcaaattctcgatggtcgattggggagtattcagtacatggaaccctgatccgaccggaaccggaaacaccttgatcatcgaattccggggcaaggctgacaagtattcgggctcgaagccgaacgaccttgcagacgatttctacgaataggctgcgatccggccggttcggtgaccggacaggcggatgacatccccccccctccgggcttccggaaggggaggaggaatgtttcggctccgcgccgggacacgaagacggcaaattttctacaatcatttttttaccagcgttaaaatggcgcatttatgaccaaaaaaatctttctatcattgatggctgttctcggcctgttcttgtccgcccatgcgcaggaacgggaaattacgggttcggtcaaagatcatgcgggggccggcatcgtcggcgccaccattctggtcgaaggcactacgaagggtacgacctccggtgcggacggcagcttttcgatcaaagccgcaccggacaatgtgctggtcgtatcgttcatgggttatcagtcccacacgatcaaggtgggaacgcaaacccggatcgacgtcgtgctgaaagagaacacacaggctatcgacgacgtgatcgtcgtggcgttcggtacggcaaaaaaggaggctttcaccggttcggcgaccgtcatcaaatcggacgacatcgccaagtcgcagcagtcgaacgtagcgcaggctctggccggaaaggtcgcgggcgtgcagctgaccaacacctcaggacagccgggagagagtccgacgatccgcatccgcggtttcagttcgctcaacgccggcaacgatccgctctggatcgtggacggcatgccttactcgggagacctgaacaacctcaacccgagtgacatcgaatcgatgactgtgttgaaggacgccgcctcgaactcgctgtacggcgcccgcggcgccaacggcgtagtgatgatcaccaccaaaaaggccaagtcgcaggaggctcacgtgacaatcgacgccaagtggggcgtcaattcgcgcgccgtccaggattatgcgtacattaccaacccggcgcaattttacgaactgcattacagtgcgctgaaaaactactatgtcaattcgggaatgagtgtcggcgaggcccatttgcgcgccaatacgaatttgacggccaatgcgaatgacggaggtctgggctatatggtctatacggttccttccgggcaggagttcatcggcatcaacggtaaggtcaatcccgctgcgactctcggccgccgtctcgtctatgagggcaaggagtactacatccgtcccgacgactggaccgatgcggctttccgctcgtccctgcgtcaggagtacaacgcttcgatctccggccagaccgggaacgcctcgatctacggatcgttcggctatttgaacaacgaaggtatcgcctacaactcggacatggatcgttatacggcccgtctgcgcgtggactatcaggccaagaagtggctcaagttcagcgccaatgccaactacacgcatttccgctacaaccagatcgacgacagcggcgccggtaactcgtcgggcaacgttttcgcttatacgacggccgtcggtccgatctatccgctctacatccgcgacggcgagggtaatgtcatgtacaacgaggacggcatcaagctctacgactacggcaacggcgacaatgccggtatggagcgttcgctcttccccaacagcaacgccctctcggattcgcgtctcaacaaacaggaagccgaaggcaatgctttcaacggtacgggatatatcgacgtcaccttcctcaaggatttcaaattcacgttcaacgccggcgtttcgctcgacgaaacccgctccacctcggttacgaatccctggttcggacagttcgccagcgaaaaaggcatggtctcgaagggccatcaacggaatttcgacctcaacctacagcagattctcaactacaccaagcagataggctcgcacaacatcaacgtgatgctgggccacgagtcctaccagaaccgcatttacacgctgtcggccacgaaaagcaatatgctgacgcaggaaaacgacgagcttgccggggcgatcatcgacaaacagggagccggctcttaccgggttgagtacaacaacgagggttatttcgcccgtgtcatgtacgattacgcaggcaaatatttcgcctcggcctcctaccgccgcgacgcttcttcgcgtttccaccccgaccaccgctggggcaacttctggtcgctgggcggcgcatggatcatttcgaaagaaaatttcatggagagcacctatgaatggctcgacaatctcaagctgaaggcctcgatcggctcgcagggtaacgacaacatcggtaacttccgctacacgaacacctacacgatcgaaaacgccaacggaaaggtctcgaccgtcttcaacgccaaaggatccgagaacatcacctgggagaccaactccaacttcaacgccggtgtggagttcagcttcctgcgcggtacggtttccggaggcgtcgaatatttcctccgcaagacgaccgacatgctgctgtcgttcccggtagctccgtcgctgggctattcgtcctactacgccaacgtgggcgacatgcgcaacagcggcgtcgaaatcgagctgaactttacgccgatccgacgggagcatgtccagtgggacatcaacctcaacatgacgcacctgcgcaacaagatcaccatgctgccttctgaacgacggaccaaacaggtcgatggctactccggttacgtgagcggctccactttcttcggagaagggcttccgatgtacactttctacatgaggaaatatgccggtgtttcggacgagggcctttcgatgtggtacatgaacgaaaccgacgacaagggcaacccgacgggcaagcgcgttacgacgactgaatatgccaaggcgtcggactatctctgcggcgacccgattcccgatctctacggcggtttcggcacgagtgtcaatttccggggcttcgacctgagcgtggccttcacctaccagatcggcggtctggcttacgactcgggatactccgcggcgatgtactcgccggccaacaagacgacgggtatgaactggcacaaggacatcctcaatgcatggtcggcggacaatgcgtcgtcgaacatcccgcgcctgcagtatgaagacaaggatcagaacggtatgtctgatcgtttccttacggacgccagctacctgaacctacagaacatcaacttcggctacacgctgccgtcgaatttcaccaagaaggtcggaatcgagaaggtgcgcgtctaccttgcctgcgagaatgtctggtactggtccaaacgtcagggattcgatccccgctactcttattcgggatcgacgagccaggccacctattcgcctgtaaggacgatttcgggcggcatcaacattcaattctaatcggcctcaaacactttacgacaaacgacatgcatatgaaaaaagcgacaaacataacgctcgcgacgctggcggcagctttgctggcaagcagctgcatcaaagaagccgacccctatgaaatagctaccgaggatcaggtcaccctcgaaacgctgatagaaggcattccggcctcactcgtacaggccggttccgcaggctatgcaagcgaaggccaagcctgggattttgccctgccggccatccatatcgccacggaatccatgacgggcgacgtcgccattggcggcaatatcggctacgattggttcgcacagtggggaaccaacgaagcgctcggcgccgactatgccgtgggtgcgcttacgtggaataactactatgcgtggatcatggcggccaacaacgtcatcaaacagatcgacgcctcggatttcgcgacgctcgacgccacgcagaagtcctatctgggcttcgcctacgcctatcgggccatgttctacctcgatctggtgcgtctgtacgagttcaaggagaacaattacactgaagcgcccggggttctcgggctgggcgtgcccatcgtactgcccgagactaccgaggccgaggccaagaacaacccccgtgccaaggtcgacgacatctacgatcaagtgatcttccccgacctggacaaggccgaagaactattgagcggctttactgctcccgacaagtatacgatcagtccggcgctggtctacggcctgaaagcccgggcctggcttgagcgcggtacggccaagaacgacgccgaagcctatgtttccgccgccgagtacgcccgcttggccattaacgccagcggctgtacgcccctgacgcaggagcagtgggaagacccctcgaacggcttcaacagcgccacggcgaacaatgcctggatctggggcctcgccctgccgagcgaaagcgttgccaacctgttctgcttcacggcgcacatgagcacggagaatgcgtggagcgcctacggaaacgacgcctgccgctgcatcaacagcaacctttacaacagtatcgacctgcgcgacttccgccgccattcgtggctcgatcccgaccgcaaagacccggagaaggagtcctacgactacaaaagctgccgcaaagaggggaaggaatacttcaatgaactgcccgattacgcgaacatcaagttccgtccggcgcagggcgcttatgaggatttcaaggtcggcggagccgcagaccatccctacatgcgcgtcgaggagatgtacttcatcgaggccgaggccaaggcgcatgaaaatcttggcgaaggaattcggctgctcaatgagttcatgaacaactaccgcattgtgggcggaggttacgactgtacgaacatgtcgtcgtcggttgaaaatttcaccaacgagctgatgcttcagaagcgcatcgagttctggggcgaaggcatcgtcatgttcgacatgaagcggctcgacatgtccacccgacggggctatgtgggaaccaactctcctgcctcgtaccggctgaatacggaaggccgtgcaccctactggaacttcgtgatctcgcgcggtgagacgcagaacaaccccgtcatcgccacgcagaacaatcccgatccttcgcaaacggtcaagccgtggaacgggtgatgaccatctgcgatcaagctgtcaaatctaaaagcaaattaccgtgaagacattcaagcatatattaccgttcctgctggcacttcttgtccttgccggctgcgaggacgacgtgaactatacgcagggaaccgcggagaatcccgattgctacggtgtctacttcccgaagaagcaggctacccggaccgatctggagttcgaaccgggaacccagaccgaagcgacctatacggtcaaacggcgcaacaccgtggatccgatcgtcgttccggtcgtcgtgaagtccaacgtcgaggatattttcgtcgtcgagccgatcgcattcgatgccggagaggacgagacgacctttacgatcagtttccccaaggcccaaatgggcacgacctacacttgcgatatcaacatcgaagatccgcgctacgcttcgatctacggtgccgataaggtgaacctttcgatatcgctcgtgctggccaaatgggaattggtcaccgacgaaaagaccggtgagaccaaaggccgctaccgcgacgacattctgggcaacttcgcgtcgatagacaaccccaatgctaatccgaaccccgaaatcgaactcgaaatctacgagcgttcggacaagaagggctattaccgcatgaaagcctacactccggagctgatgaacatcttcgccggaggacaggtaaaccacgagaaccgcaacgtctggacctatgtcgatgcctcggatccgaacaaggtctattatccctaccaatcgaccggtctgaccctcttttccgatatgggtgagtggtacatcgcatcgcagacaccggaaaatttcgccatggacgaatcagccggacaatatggcacgctcaataacggcgtgattaccttcccggcgcagggtatcgtgctcgaaccgagcgaaggtgaatatgccggaaaattcttctatgccaacgcaaacggtctgcagcggatcatgcttcccggagccagggtctacgattactcggtggccctcaccaaaagcgaacccgcagacggtgtcgtcgaaatcggcgccaccctctccgaggacacccgagagttccgctatgcgatcttcacgggcaatttgagcgacggcgaggcgagcctcaaggcacaggagatggccgatggcaagatcgccgcggaactcatcaagacgatcactgtttcggggacgatttccgttcaggatctggaaggcggcaccggcaagtacacgcttgtaggctgcatctacggttcggacgaagaggcgaatccggagggcggcgaaacggcgtcgcagaatctgaaaatgcagggctacgcctccatttcgttcggatatatcgccaagggcgacgaggacaaggtttccgtcattctcaacatcgggctcgaagccacgaacgaattcgcgggacaaggcattacgacggacaatgcggcgaaattctgggcctatggcgaggggattgaatctatcaaacacggagtcttcaagacaaaagacatccaaggattggacatgacggctttcctcaaagaggagggcaaggatttcaccaaagagcagctcgacgccatcaacggcggacattacagcgtcatgctcacggggctgaacggcgacacggagtacacgttcgccggactggcttacaacggatatgccagcaaactcttcacggcatccatcaagaccaccggtgtatacaacccgggattggagagcgagttcctctactcggacttcctgccgcagaaagagcagccctcgaaggagtacctgatttcgaccgaatggaactattatgccgtcaacgtcatggatgagaagccgatgcgacggaagatcggcacggtgaccatcgaagacgacccggcagaaagcagttcggccgatctgctgaccatcacgggactccccggggtcgagttcgacgaaggcggtcggattccggcggtctacgttccctccactgctccgctcgcaggcataaccggcgctatctccccgcttctttcgcaaacgccgatcggtgtcatcaacggagaggacatcctcgccggctgcgtctcggaggagaatcccgaagccctctatgcggtcaattatccgttcatcggaggcgccgtggccgacggttacatctatttcgtgcccaccccgaactatgtcgagcagggggccacgttccgttatctgtatacgttgagtacgacgaccccctattcgatccttacggatatgttgctcgtcgatcccgccaaggatatgggcggcattcccgaactggccgcagagcggatcgcagaattgcgccggatggccgcagagctccggcagccgcggaattacgtcgaacggctcgaattctccgtttctacagaacgcagttccgtcaaaaccgtaccgaccgattatgcgaaaagattcctgcccgcatcggctcctgaagcgaaagccgtaagggctacggtcggattcagcgacgctgtgcagcgtgcgaacggttcgggatcggaactccggttccggaaaacggccgctgccgaaatcacgctcaagtaatatcggatcgggagaggccggtcgtccggcaagtgtcggcctctccctttttttcaagccaaaaacaacctgccggactcaaaaatcagcatgatatatgcataacaaaacgaaactcctgattttcgcctccctgctgctggccgcctgctcgacggatcccatgcaggaaataccgaaccgcggggattccgctcccgaaatcgagacttcgggcaaaatctgcaatacgtcggacgacgccgtggccggttcgctcatcgtaaaatttggcgaagaagccattcccagtctcgaacagaatgcgttgaatgcggccaagacccgttcggcgctgacccgttcgggcatcgaatccgtcgatgacatcctgaacgacctgcatgtcacctcgctggagcgcgtcttccccgaagccggcgaacacgaggcccgcacccgtgcggcagggcttcacagatggtatgtgctcgggttcgcatcggaagaggatctcgacaaggcggccgagagactcgcaggtgtcgccgaaatctcgaaagtacagttccgcacccgtctctaccgggcttccgactgcaaaacctatccgtttcaagcaacggcgaacggccagacccgcgctttggttacagcggatttcaacgacccgaatcttttctggcagtggcattacatcaacaatgccgaccaggccgttgccactacatcggtggccggagccgacatcaatgtggccgacgcatggaagctcacggcaggtaatcccgaagtcatcgtcgccatcgtggacgaaggggtgaaatacactcatccggatctggcggccaacatgtggatcaatccgaacccttcgcccgaatacaagaaccaggacattcacggatggaacttcgctgccgacggtcccatttcatggggtcagaagggcgattcgggacacggaacgcacgttgcgggcacggtagccgccgtcaataacaacggcatcggcgtctgcggcgtggccggaggtacgggcaagggagacggtgtgcgtctcatgtcgtgtcagatcttctcgggagacctgacgggtgacgccctcgtgtcgagccgtgccgtaaaatacgccgcggatcacggtgcctccatcctccagtgctcgtggggcatcaaggcgggaatatacacgtcggacaacatgttcatcaaacaatcgccgatggattacgaggcgcttcagtacttcgccgcccagaagaactgcgaggccctcgacggcggactgatcattttttccgccggcaacgaatcgacagccatgtccggctatccggcaggctatcgtgattatatctccgtcacctcgttctcgcccgactacctgccggccaattataccaactacggttccggctgtaatatcgcggctcccggcggcgaaacgagcggtttgagcggtggggagaaagccggcgtcctttcgacgctctgctccgaaacgagcaacggagcggattacggctacatgcagggaacctcgatggcttgcccgcacgtctcgggcgtagccgcactcggcctctcctatgccctggagaaagggaagagatactcgctcgacgaattcaagaccatgctgctcacctcggtcaatgaaatcgactcccggctgggcgaaggctcgaaagctacgatcgccgacgtgtcgatttaccgcggcaaaatgggcaccggcattaccgatgcctatcagctgctcatgcagattgaaggaacgccttgtctgcaggtcgcattgggcgaggtgcagctcattccgctgacgcagcatttcggacagggtgccgaagaccttacctataccgatatccagatgtcggccaaggatatggaaaagcttggcatcaaggcggctcccaaaatgtataatggaaaactgatgatcaaatgcacgaaacccggatcggccaaaatcaaggtttcggcgatagccggcggtacgaaacctggaacgggcgtcgtgatgggcggcatggtcatcaccaaggaattcgccgtcatcgcccgttcggccggcgcagcaaacggaggttggttataaaaacagtgcttgcaatgaaaaaacatctttatcatctgctcgttttctccctgctcggcattttcgccgcaagctgttcggatgacgacgatgcccccaacattcagtcggaaatcgtaggcgaatggcgccttacttcttggtcagagaatgctcccgaaggatttgaggtatacgtagaattcacttcggcagcgacattcggactttatcagaaggtcgaaacatcgaactacaccaaatacaccgggcgttattcgatcgacggatcccggctgaccggagtgtacgacgacggcgagagctggggcaacggctacgatttcgagttgacgaatggcgggaacaccctgacgatgaccacccgaaccgagccggccgaaaccagcgtatattcccggacgatcattccggatgacgtgcgcaatgcccgaacatcccgtgccgagttttctctggaaatgaggcgaatgctataatctgtaatattcgtgccgctccggcattaagtgtaaggtaaggacaagaagatgtggttgaaacgctaataacggtcagaccagtaacgcttcaaagtgtggaaggcatttgtcaaccgacaaataatttcgagtgaaaatctcttatctataatgtgttaaaacattaaaataaaatgttcaaaattacgagattgctcactgggataggatggctaaaaccatcctatctttttttagaatatttctacgagaactgcaatataagcattcagacaattgcatgttttagcaagatttattgaaatttaatgttttaaatgtatcaatctgaaataaaaatctttgatatttgagtgatgatttacgttttctgccgactggcatatttgcccccgtggacatttgtctgttgtccctgaacgcaattcctgtcatgtaatcccgtaataatgcacgatccgcgtccggcggcgcttgtcgcgctttgggaaggagccgtctcacatctggaatttgagatgcggatggtccatctgcgtatcgagcattctgcggtcatgaaccggttgcgggaacccgaaaaaccccgctcggcgctctatctggccgagccgttcacgccgacggatctcatggagctgattacggcgttgcatactgccggcgtgggacggcgtatcgacggtacccgtgccaatgtggaacagttggtcgagctgttctcgtggatgttcaatgtccgtatcaacaatcccatccagtgccgccgtggggtcatcaaccgcaagttgcggctgacacggtttctggatctgctgcgcaactctctgattgaagagagccagcgataggcgtcggcgcccctcatccgaggggcgcttttggccgaatcctttcaggtatcaagtagccgacgccagccgctcgccgaacgcttccatctcgcggccgatgaccgtctcggagaatttggcgtagtggcgcgtcatgttggtgttcgagtggccgagaatcttggccagcacatcgatcggcatgccgtactcgacggccatgcaggcgaaggtgtggcgtgcgcagtgggtggtcagcaccttgtcgatgccgcacacggccgcgatctccttcatgtaggcgttcatcttctggttgctcggcgtggggagcacccgtgatcgtgcgacgcatacttcgtcgtgctcgtagcggcgcaggatttcgagcgtggccggaagcagcgggatgcggctcatcacggaggttttctcgcggggtttgtgaatccaccagcgcccctcgtcgtcctgcgagaggtgctcgcgccgcaggtggtcggcgtcggcgaatgccagccccgtcaggcagcagaagacgaagacgtcgcggatgcgggccaaccggcggtcgagctccttgcgggtcagcagttccagttcatgcgccgtgaggtgctctttggcctgcacctcgtcctctttgagtttgtagtagcggaacgggtttttcgtaatccactcgttgcgcaggcagtagaggacaaagttgcgcagacagtccatcacggcgaccgccccgttgtggcggcagcggtgggcggtttgcaggaagaggttgaagccgtccagaaactcgtagttcatccgttcgacgggaatgtcctcggctttgccgcgttgggcgagatactgtttgagatagcgcagcagccgctcgtatttgtctgccgtgcgctgcgtgatgcgcacgcccacttcggcctgccgccgcttcacatagtcggtaaggcccgcaatgagcatcatcgtgttgcacgtcgggttcaggtagcgctgtttgatctgcgcggcattggccgcatagccctcggccagcagtttggagcggatgtccaaaatctgcacacggaactcgtcgagcatttcattgactttttgcgcaagtcggctcgtgcccatcatgcgttcctttttctggttccacaattcgggcttgccctcgcaatggaaatagaattcctgccgcagactgcccgtggtgacgcgggcgtaaaccgacgccaagccgttctttttcggtcttccttttcgcatcaggaaaaggatggtaaaagtttcctgtctcataactcgtgacattttaaggattgacaaaacgtctgcaaggaaactttattgcggtgtaaagtgtagcaaaacaatgcattgcgggctaaaaaggtggcaatcccgttttcggaagcccaaatcggctctgcccacttttttgccacccaacggttttcttcggcttgctttccgcttccggttcggggaatcggtcgaagcctttgcaaaatgatgatatacagtcggttttcctctttttgcgccggacgggcaacaaaaaaggagcctcggaaaaaggctcctttgtgcggataaagggactcgaacccccacgccgtaaggcatcagatcctaagtctgacgtggctaccaattacaccatatccgctcggtatgtgcaaaggtatataaaaattcacaaatcgcaatccggggcggggattataaggcttttttatttacttttgtagataattttacccgattatgccgcagaatatcacactcgtcctgacaccccggcaggctgccgatgcgaagtattacacgtcgctcgccgcacggcgtttgggcatgccggagcaggatatcgctttggtgcgggtcgtcaaacggtcgatcgacgcccggcagcggcagcccaaggtgaacctgtcgctggaggtatatgcagaccgcgaaccccggcccgcgcccgtgcatttcgactatccgtcggtcgcggggaggaccgaagtggtgatcgtcgggtcgggtccggcgggccttttcgccgctttgcggctgatcgagctgggcctgcggcccgtgattctggagcggggccgcgacgtctcggcccgcaaggtcgatatcgcgcagatcaaccgcaacggcgacgtcgatcccgattctaactacgctttcggcgaaggcggtgcggggaccttctccgacgggaagctctttacgcgcagcaagaagcgcggcgactataacaaggcgctgcagacgctcgtcttccacggcgcgacgcccgaaatcctttacgatgcccatccgcatatcggcaccgacaaactgccgcgtatcatacagcgcatccggcagacgatcctcgatgccggcggcgggttcgttttcaacagccgggtgacggacctcgaaatcaaaggcggccgggtgcggggcgtatggtgcggcgcgacgctcgtcgaaggtgcggccgtggtgctggctacgggacattcggcccgtgatatttacgaactgctgcaccggaaaggcgtgcgccttgaagccaaggctttcgccatgggtgtgcgtatcgaacatccgcaggcgctgatcgactcgatccagtatcattgcgaaacccgcggcgaataccttcctgcggcggcctattcgctcgtgagtcaggagaacggccgcggcgtctattcgttctgcatgtgccccggcggattcatcgtccccgccatgaccgatgccgcccagtcggtggtgaacggcatgtcgcccagcggccgcacgtcgccctatgccaattcggggctggtgaccgaagtgcggccggcggatttcgaacacctgcgcgccgaatggggcgagttggccgggctgaaattccagcagcagttcgaggagctggcgcggcggtacggcggcgaccgtcagatcgctccggcgcagcgcgtcgccgatttcgtcgcggggcgtgcgagcgcgtcgcttgccagaacttcctatattccggggatcgtcccttcgcggctcgaccggtggatgcccggattcatcgcgcagggactgcggcagggacttgcgaccttcggccgccggatgcgcggcttcgtcaccaacgaagccgtcgtggtcggcgtggagtcgcggacctcttcgcccgtacgcatcccgcgcgatcctgcgacgctgatgcaccccgaagcagccgggcttttcccggcgggtgaaggcgccggatatgccggcggcatcatctcggcggctctcgacggcgagcggattgccgaagcggtgaagaattacatagattgagtatctctaaaaccacatgaccgatggaacctaaaaagtaccttttgttcgttaccctgccttatgcctactcgatcctgcggccgctggagcatgaaatccgccgccgcggcgattctgcggcgtggtttatcgaagcggattgtccggttgcgctggaggagggcgaagtgcatctgaaaacgatccgcgaagccgtcgattacaatcccgtcgcggttttcgcgccgggcaactacattccggatttctttccgggcgtgaaggtggcgcttttccacggttatgccattcagaaacgcatcgaggcgatcgacgaccatttcaccgtgcgcggctggttcgacatctactgtacgcaaggtcccagcagtacgccttatttcaaggagctggagcggcaatacgggtttttccgggtctacgagaccggctggcccaaagccgacacctatttttcacccgaaacgcagctcaggccccgcaacgaccggcccgtcattctctatccgccgacctttacgcgcaatgtatgttctgcgccccatctgatgaaggagatcgagctgctggccaaaaccaagccgtgggactggatcatcaccttccatccgaagctgaccgatcccgatatcatcgccggatacaagcgcatcgccgccgaaaacgacaacgtgacctttttcgagggacccgataagatgtcgctcctgcagcgagccgacgcgatgttgtgcgacagttcgtcgatcattctggagttcatgttcctcgacaaacccgtcgtcaccttccgcaattcgcatcccggcccccatctgatcgacgtggaccgtcccgaaaaggtcggtccggcgctggagcgggcgctctcccggcccgaagagctgatgcgcgagattcgcgcctatacgatgcaccatgagccgcaccgcgactgccgctgttcggcgcgcgtgctggatgccgtcgacgactatatcgcccgcggccatgcgggactgaagcgcaagcccctgaatctgatccggaagtggaagcttcgccgtcagatgcgctattacccgctgctggagatgttccgccgctgattgcgtgcgaaaaacgaaacgccgcatccgagggatgcggcgtttgccgtttgtatatgttatatgtgcagtcccttgatgaccagcttgacccatagccgggagtttatcatgcagctcagccgggcgatccacagggctttcgtgtcgtagaatcccttgcggaattccgaacggacgtaggcgcggtagaacttccagttgtccagtatgccctgcgccaactcgttggccagctctgcgttccagcctttggtcctgcgcagttcgcggcgcaggcgcgaaaactgcgtccgggtcgtgaggtagagtatctcgtcgcagtagcccagcgacttgtactgttcgtggatgtagcggcgtatgcgcatcagcatcatcgggtctatctttccgcgcagcagactcgtggggacgtaccggtaatggtatgtggggttgctgttgctgacgaggtgggtgatatgggcgcagtactgggccgtgaatatctcgtcttcggcgtatcggatgctgcggtcgaagcgcaggccgtgccgttcgatcgtggcgcgcgagaacattttgttgcaggtccagccgaggcagtgtctgcgcagcagctgcgccagtacgggcatgcaggcatcccggccgcccgtgacccggcaatccggtatcgcataaatccgggtgtgtccgttggggtgcctgccgcttgcgggacgctcttcgaacaggtttgtgaaggcgactccgtcctctccgatattgctgtcggcgagttgttggaggtggtccggagtgacccggtcgtcggagtccacgaagaccacgaattcgccccgtgcgttgtccagtccgagatttcgggccgcgctgacaccgccgttggggatatggaatacgcggatgcgtttgtccttttcagcgtaacggtcgcagattgctcccgaaccgtcggtcgatccgtcgtcgatgagcagcaactcgaaatcggtcatgctctgcgagagaatgcttccgatacattcatcgaggtattgtgctgtattatagacgggggtgataactgaaacaagcatatgaaatctgaaaattgtcgggattcggtcagctgcctgcgcctgcggggacggcagtctcggcgtcggtatatacgatccgctccgatgcggacagatgccggtcgagcccgcgccggcagcgggtgcggtgttcgaagaggctttgtttgtagcgttcctcgttggcggactgccggtcgcggtcgcatttgccgtgatagaggtggaagacgatgccgcggaatttcatgcaccgctgtctcacgccgctgttgttgagccgggttgccagttccgaatcttctccgccccagccgcggaactcttcgtcgtagccgtttacgcggatcaggtcgctgcgccagaaggccatgttgcaccccttgacgaaacgggagggacccagtgtccggtagagataggccatcagcggaatccggacgacgttgttgctgttgcggacgcccttcatcagcggggtcagcgaggtgatctcgccccgcagcacctgattggtgagcatctcggtaatgatgccgcgcgatccggtgacgaagcagccgggctgcgcgaaaatcatgtggtcctgaatgaaatgacgctgcaggatcaggtcgccgtcgatctggatgacatactcgccgcggctggccgcaatggccttgttgcggatttccgccagccggaatccgtcgtcctcgtgccagatatggcgtaccggtacgggcgaaaccgcttcgaagtggcggactacgtcgcgtgtggcgatgcccgaaccgtcgtcggcgatgatgatttccgaaggcatgacagtctgctgcatcacgctgtcgaggcacagatagagggctctgggccaattgtaagtggagatgatcaacgatacagtcattacagtaacatgtttttaggatgccttaccggtacggccgcatacggcacgacgcaatatctttgccgttgtgccttcgttccgtagttccggtttccggtatgttgtataatgcctaccgctttgttcattgcgcaaaggtagtgatttattcccgtcttccatcagcggcagcccttcaatagggtgtcactatgtataaacgcgcgtttccggtaaatactgcgtggagtctgaaaaaaaatattgcggactgtaaatatttttctgtatttgctatatgcttggttattatcgtgttattctatttacatgacaaattttattaaaaaatatgaaaaaaatataaaaatattttaataaaaacttgcacggaatcttttttcgccttatctttgcagtgaagttttaaggttcatttaggttagtagttttaggttggtgaggaaactctggaacccggacagcagtccgattccgtgtttcctttttttgtgcccgtttccgaaccgccggttttctcccggccgatttgtctgtcgctttttattctccggtcgcttttttttctccggtcggtttgtccgacgcctttttctccgctgttgcttttttctttgccgccgtctttttgtctcccgtatttttttctcccgttgcttttttttgtttgcaggccgtcgtttctgcaactttttcccacgctgtttttgtgggacggcaggcgtcgtgattctctccgaacccgtcctgaggggctttttcagcgctttttcgccgccaatgttaccaaattgttaaatatatttaaaatattcataaaatatttgcgtaattcaaaaacgccccttatctttgcagtgaagttttaaggttcatttaggttagtagttttaggttggttgaggaaatcggcaggttgtaacggagattccgttactaagacttgaagggcggtgctcgtccgagagtcgaatacctccgattaaacctcgtttttggagggggtggttccccgccaaaaaaaaggtctgagtcgtgagactccggccttttttcattttacggccctgcggccgtctctttttcggaggatgttacagattctccagctcttcgcggctcatcgtcacgtcaacggctcccagcgcatagcatccgatgtcgtaaggattgtagtagaaggtgatcccttcgggcgtaatccggaaattctccgtcagggagatgtattccgggaaaaatccccgttcggccagctcgtcgtcgttggcggcttcgtattgctcgcagagtttcctgcgcagcagggcctccatgccgagcagttgccgttcggagaagaggtccgccgtggagagttcgtaccctccggccagcgaataggtatggcactccgtggcgtacatgccgtgcgcccctcccgtgtagctccaccggctgatgatgtaggtgacgagcgagtccgtgacggctgcctcggcttcggccgagatttcgtaaggctccgtcatctgcggggcgctctgcggaaatgcaagctccgcggcgatctggcggagggcggaatcggccgcctgacgcgccgtgccgccgaactcttccagttcgaagaaatagcctgcgttggcggcttcgatggagcgcagggcgggggatttctctgcgttggcgatcgtggcgaagcggtattcgatcttgcatccgtttgcgggcgtgccgatgagggtgtcgattgtcagcatgccgaattggggaacgacgggcttccgcgtgcaggctgccgtcgccgcagccatgcctgcgatcagtatggcggttttgatgtatttcatggtctggacatgttttgtatttatcgtaaagatacggaaaatgcggctatatgcggggttttccaaaaaaaatcgtagaatttgcaggaaaattttgcagttttaaaagaaggcgttatctttgcaccacaaaactcacacggtggattcatctaagggttaggatacgtgcctctcacgcacgacataggggttcgaatcccctatccactactaagcgatcggtttccggtcgctttttttgtgcgcagctccgcgttggggcggagtcattcgccggaattccgcgcggtttcagcttccggatagtttcgcgtgccggtttttttccgtttcccacggttctcgaatgacgtgtgcttcccgatgccgtgtgttcccaacttcccgcgtcgccatgtggcggatgttttcaaatgcagcggccgcccttttcggggcggccgctgcggcattgaagttaaaggttatttgattggttggtgggtttacttttccgatttgctcttgaatttgtctaactgacgcttgagggcgtcgatcgcttcgtccaccgactcctcgaaggctttggactggtggcaggccacgaggtcctcgcccggcatatggagtgtgatcgttgcgatcttgtttcctttttcatggtctttatcgagtttcagaatgacctcggcaccggtcgaacgctctgcgaagcggtcgagcttttccattttgtgctctacgaattcgatcagccgtttgtctgcgtcgaatttcacggattgaatctgtacgttcatagccttacagtttataaaagttaatcacttccctcccttttcgcggggatgggcttttgcgtatatctcccgaagccgggcgatgctgttgtgcgtgtagacctgcgtggcctgcagcgaggcgtggcccaaaagctcctgaatctcgcgcatgtcggctccgccgttcagcaggtgcgtggcgaacgtatgccgcaatacgtgcgggcttttcttgccctgtacgcccgcgcgggtgagttcctcctgcaccgtgcggtagacgacgctccgggatatgcgcttccctttatgtgttaaaaatagtgctttttccgaagaaatgcaaatattttgcctctctattaggccgaggtagtgcaaaatcttttcgcgcaggaattcgagaatcgggaccatgcgctgtttgtctcccttgccccggacccgcagcgaggtgtagtcggccgaaaagtcgctgcggtcgatgccgaccagctcggccagacgcagtccgcaggcgtaaaacatcaggatgatgagcgagttgcgctcggtctggaaatcttcgctgtccggtccgcactcgctgacgatggtcgtcatgcggctttcgggaacgaatgccggcaggcggcgtgaggttttgagcgtcgaaatcatgcggaaaatatccttttcgacggctcccgtgcggtgcagccaccggaaaaaggcccggagcgaagccacttcgcggttcatcgacccggcgctgagctttccctcctccgtgcggaaaatgatccattcgcggatctgctcggtcgtgaccgaccgcgggtcgaaccgcgactcgtcgcagtccagccacgcgaggaactgctccacgtcgtgcttgtagttgcggaccgtgagcggcgagtagcgccgctcggcggagagatatcggatgaattccgtcagcatgcggcaaagatacggttttttcgtatttttgcgtattcataaatagtatgccatgaaacgaatcttcattttagcctttctgctggcgtggctgacggcgcagtttgccgccgccgctgcggtcgatacgcttgcggtgcgcagcgcttccatggaccgcgacattcccgtgatcgtgatcctgcccgacggcgcttcgcctgcgaatccctgcccgacggtctacctgctccacggttacggcggcaatcagacgacgtggctccggatcaaaccgtcgctgcccgccatcgccgaccgcgaaggaatcgccttcgtctgtcccgacggcgcgacgagctggtatctcgacagcaaggtgcgggcgaagagcctttacgagactttcatgacgcgggaactgcttccggccgtcgaggagcgttatcccgtttcgcgcgaccgcagcggtcgcgcgatcacggggctcagcatgggcggcttcggcgccgtgtcactggcgatcaggcataaggagctgttcggggccgtcggcagcacgagcggcgggctggatatccgcccgttccccgaaaactgggagattccgcagctgctgggcacgcaggccgagcatcccgaagcttgggaggcggctacgccgatcaacctgatcccgcgtatcgccgacggcgatctggcgatcgttatcgactgcggttacgacgatttcttcttcggggtgaacaacgacttccatgccgagctgctgcgccgcggcatcatgcacgacttctatgtgcgtcccggccgtcacaacaacgagtattggggcaattcgatcgactaccagatcgtatttttccgcaacttcttctttcgggacaaatagttgggccgatgaaagagagctggaaacccggaacgctcatctatccgctgccggcggtgctggtgagctgcggcgcgacgccggacgagtataacctgctgaccgtggcgtggacggggacggtctgcaccgatccgccgatgtgctacgtctcggtgcggcccgaacgccactcctacgggattatccgccgcaccggcgagttcgtcatcaacctcacgacccgcggtctggcccgtgccgcggactggtgcggcgtacgttcgggccgcgattacgacaaattccgcgaaatgggccttacgcccggcaaggcgctcaaggtcgccgcgccgatcgtcgaagagtctcccgtgagcatcgagtgccgcgtgcggcaggtgcttgagctgggtacgcacgacatgtttttggccgaggtggtcgccgtgcaggtcgatgccgattatatcgaccctgccacgggccgtttctgcctcgaacgggcctgcccgatcgtctactcccacggcgaatatttcgcactgggcgaagcgctcggccatttcggctggtcggtgcggaaaaagccgcggccgaaaacgccgaaatccgagaccggaacaaagcccgtgaccggaaagaaatccgcacccggaacaaagcccgtggccggaacgaaatctctgaccggaacgaaaaccgcatccggtgtagaatctgaggaccggacttcctccgcattatcttccgcaacgccctctgcctcattgtcatcctccgcatccgcaatgactccggcatccgccttgtcttcctccgcattatcttccgcaacgccccctgcctctccgtcatcctccgcatccgcaatgccttcggcatccgccttgtcatcctccgcatcctccgccgcatcgtcagccggccccaactcaaactccaccccaagccgtaacccgaaccgcgatccgaaccgcaggccgggacgcaacccggatcgcaggcaggggcgaaagtcgggacccgaaaaaccgcgccgccgatgaaggcgatgttgaaggagggcgccgggctttcgaacggtttgttatgcacgctggccgtcatcgccggcgtgtcggtcgccaatctgtactacaatcagccgctgctcgatatgctccggcaggatctgggcaccactacgctcgccgccaaccatgtcgccctcttttcgcagttgggttatgcgctggggctgctgttcatcatacccctcgccgatcttttcagccgcaggcgcatcgtactggtcaacttcctgctgctggccgtttcgctgctggcgatcgccacggcttccgatatccgtgtgattcacgggttttcgctggtgacgggcgtctgctcggtcattccgcaaatcttcattccgctggcggcgcagtattcgcgcccggaatataaaaaccgcaatgtcgggatcgtcctttcgggcctgctgaccggaatcctcgcttcgcgcgtggtcagcggcgttatcggcgagcttttcggctggcgcgaaatgtatttcgccgctgccggactcatggtcgtttcggcggccgtcgtgctgtatgtactgcccgatgcgcgccccaacttccggggaacctatgccgccctgatgaagtcgctccttacgatcgtccggtgctatccgacgctgcgtatctattccgtgcgcgccgcgctggctttcggctcctttttgtgtttctgggcgtcgctcgccttcaagatggcgcaggcgccgttttatgccggcagcaacgtcgtcggcatgctcggactctgcggaatcgcgggcgctctgacggcgaccttcgccgggaagtacatccggcgcgtcggcgtgcgcaggttcaactatatcggcgtcggcctgcagatcctcgcatggctgctgttcttcttcggtgcggattcctatgcggcgctcgtcgccggaatcgtcgtcgtcgatatcggcatgcagtgcatccagctcagcaatcaggccactctgttcgaactcgatccctcggcttcgaaccggatcaacacgatctttatgagcacctacttcgcgggaggttcgctcggcacgctgctgtcgggagccgcatggtcgctttacggctggacgggagtcgtcgcggcgggaatcctgctttcgtccgcctcgctgctcgtcaccgtttgtacgaaaaaataacgaccgcgccgggttgcatgcaattcctgccggcagcggctgtttccgaaaactgggaataaagcaatccccggaacccgcacaggttccggggatttgcctgaaatttcgggaataatcccttttgccgcttcccgtctgtccggcggaaagctttgccgggcaagacctgccggcaggctccggtctattcgaccacctcgatccattcgccctttttgagcgcgcggaccgagttgtcgtacatggcttcgcagtagatcgacggcaggtagtagcggcccttgtatgtcgccgtcagcttgaccggtatctccttgctttcgccccgtttcaggtcgaagtagctcagcacccggtcgtcgcggatgtcctgataggtgaccgacgtgaggtcccgctccgaagtgatctcccagcccgccggaacgatatgtgtcagcgccagattggtgtatttctcatagccgctgatgttcgagacggtcaccacggcgtagaaatccgtcgaagcgcggatcgacttggggtctacggccttgccgtccatgtccgtataccggacggcgatgcggatgttgtcggccgcctccgtctcttcgcccttggcggggttgtaacgctggctgacgacggcatacagactctccttgccgttgttcgtcaccccggtctcttcggtcagcggcatgctgacgaaggatttgtcggttcggatgctctctttgcccgctttggcgtcgatgccggtctgccccgacacgatgaagttggagagggtgctgagcatccacgccgtagactgcgtgctcagccacttctccttcttgaggatgtcggacatcttcagggccgtgcggaacgcctcttcccgtttgccgagcagcgtctgcgtcatgagcaccacggccatctggcgttcgctgctgttgtaggtgtcgtcgtacggatcgaccttgccggtctggccgcttccgccctgcgcggtcagctcttcggctaccttccggttgccgtccagcgcataggccgccgccagcatccatttgacgtcgttcttcaggtcggcggctttctccctcagccggttcatggcgccccggtcagccatgttgttgagcgccagaacgtactgggcgtaagcctgcgtcaggaagctgtccgcttcgttgccgcgcaggtatttgagcgcgcggtcgagcatcgggcggtcgatggcgtagccgtatttcgcggcttcggtcaggaagtgggccgcataggccgttccccactcggagctgttcgaacctccgctccagtaggcgaacgatccgttgtagagctggtaaccgcccagacgcgacaatacgctcttgacgttgcggtcgatgtcctgaagcgtccggacgtcgcactccatgacggcgggcaggtagagctgcgggaatgcgccggaggtgatctgctcgatgcagccgtgggggtacctcaccagatattccatgcggcgcgtgaggtctgcggacgggatcgacgagagttcgagcttcgcgtttccggtatccttcaggggcctgagggcgatcgttttgcccggttccagcatgtaatcctccgacgtcgttacgtaggggttgggttcgcgtacgtccagctcgatctccgagacggagctgtcgccggaggaggtcgccgtgacccgaacctttccgacgcccgtctccttgttgactttcagccggaacgttacgacctcctcgccgctttggctgagggcgatcgtcttgctgcgcgggccgacggccgagaagagttcgttcgcggagactttcaggtcgatcttgccgactcccttttcgagggcgaaaaccgtcaccggcagctccacctcttcgtccgtggagaccacgcgcggcagggtggcctgcaccagcagcggttttttcacttcggcgaccttctccgcggcgccggaagcccgtccgttcgaagccacgaccatcacgcgcaccgacccgaaatagggcggcagcgcgattttgtgggtgttcgttttgcctgcgcctagcttctgcgcttcgaggaaccgtacgacgggtctgaaccgctgcgccttcagtgcgccggtgttctgctgctgctccgcgtcgccgccgattgcgaacaactgttcgatcctgccgccgtaggcgccgatcacgtggtcgaacatgtcccacgtccgtacgcccagcgcctccgtggcgttgaaatggaggtaggggttcggcgtcttgaagcgcgtcagccccagcaggccctcgtccaccagcgccagcacatagctcatcttcttgccgtccttttcccggacctttatcgtgatctccgactccggtctgaccgtttcgggcatgtcgatcaccggatcgagcttcgtggcggcgtcttcgacgtcgagccggatcacgccgaacaaccttatcggcgcatcgttgtgcgtatggttatggggctggacgagcgtcaccgaggcgtagacgttgggagccattccggctttgatcggtatctcgaacgcggtctgtttgtcggcgcagtcgatccagaaactttcccgtacgacgctgccgctctcgacgctcaccagcgcccgcgcttccggcgaagaggggatcgtgatcttcgccttgtcgcccggcgcatatttctccttgtccttggtcacggcgagtcgggtggctgcgtccgtcaccgaggagacgtcgccccgccagtcggaggacgatacgcaaacgacctgagtcgcagcgtgttcatggcccgaaccggtcacgcggatcatataatagccgtaatcgcctgcgctccagcgcatcgcgacctgccccgcgccgtcggtcaggggcgtctgcaatgtcttgtagcaggtgttgagcgcatttttcgcataacgggcctgcgagtccgacgcggcgtcccaccaccagtaggaggtgatcttgtagaccgagacgagcacctcctccctgccgggcaggggacgtccctgcgcatcgagcatgacgatgcgcagcagatgttcttttttgctgtcgaggtattcgtcgccccagtcgctcgtctggggcgtcactccgattccgaaataggcgtcgtagggcgacacggggatgatctgctgatcgacgctgaaatcgccgctcttttcgaagaccttcaccgtgaatttgccgctcagcatgccggggctgagcccctccagcgaagcgagtccgtcggtcgtcagctgcagcgttccctgctggtccgtggtgccggagacgatctcccgctcctcggtttcgaaatatttcgtcgcgtcgtcgaacgagtacttctcataacccttgaaacgcgtcggaatctgcctgagctgcgcctgaagcgtcatttttgcgccgtccgccggagcgccgtgcagccatttggccatcaggctgcccgtgaactttcgggcgtcgatccgcttgccgtcaccgagccgcatgtcgattttcattcggttgggcttgatggcgtccacgcggatcgctttttcgaataccgcgccgcccagacttacgcgcgccagccactgtccggtaggcgccgccggcgtcgttccgagtttgaacgtgtagatgccgtccgaggagccgttgctgaccagcgtctgcaccagctgcccgttggggttgaagaactccacggacgccggatggttttccggcagcggattgtcggacgtgacgatgaaggtgaggaagatgtcgtctccgggccgccatacgccgcgctcgccgaacagaaaacccttcgtgcctttggggttggtggtgcccccgacgtcgaaattgctcagtgacagcgccgcgccccgctccaccttgacgaaggcgagctgtccgtcggcttcggccgctacgatggagggctcctccctgcatttcagcacggcgcggccttcggaatcggtggatgcttccgccacggtctggttctgcttgtcgtaggcccgtaccttgcagcctcctttgggccgggctgacagcaggtcggtggtgtagacgacgtactcctcttcgccgctgcttttgcagatgatgccgatgtcggactgcagaaccagtttcgaccgctcccggtaagtccggtaatctccgaaatagtagtcgtaatcatactcgtcggtgggaaccagcggttcgacgcccttgatctccagcaggtacatcgacttccggccgtcggttatcaggcggctgagatccagcgaataggtgttggagaggtcgagcttggtcgatgccttggccgagagatcgacggtcgtatcgcggacgatgcgcgacacgtagtccatagccgaatagtagtcgccgccgtagtagttctgctggaagaactgcagcaggttgttggcgaatattttccgcacgcgcacccgcgccttgcggtagttcaccgcttcgaacagcagggacatgtcgttcgacgaggggaggacggagcctttgcccgcgaagcggatcgccggcacccgcgacggcaggttggccgtgaacgtatagctctccttgagccgctgcccgcccttgctgagcacgttccggcttatttcgatgtcgaaattccccgtgacgtgcgattcgggatagatgtagagccggttcttgtcgaccgaggtgcggaatttcgtgtcgaagcggatcaggtccttcaggttctggctctgtttgagcggttcggagaaggtcaccaccaccgcgagcggttccgccgcgacgctgtggtccagcaccacatactcgtccttcttgggcacttcgacggtcagggtcttgctgtcgccgtagccgaaatcgagcgtcagcgtgtaacccgctccctcgccgggggcgatgttgccgacggtatactggtgcgtggtgccgttcgcggagtgcacccacgcgacgtccggattcttcagtccgcttatcttgaggttcttctccacgtagccgctctccgcgtaatcggacgagaccacctcgccgaccagtacgtaggaggtcatgtcgtcgctttgctgcagccagtagtcgctgtaggcgaaccgcagtttcggcgtggcgaattcgaattccgcgacgcctttgagctgccgtccggtgagtttcgcggcatcgatggtcaccttgtagcgggtgtcgtatttcaggggcgaccgggggatgatccgcagcatccgcattcccgaaaggtagacgtcgaaatcgacggagggcgagatcgatacggcttcccggattctgtcctctttcggctcgacgttctccttgaacgtcacgagaatcggcattttgacgcccgtcactccgttcggcgacgattcgatgatatcggacggctgcctgccgcatgaggcgaagagcaggagagccgttgcaaacaatacgtagcggattgctttcatagtggtttttttggtaactttgtcaaagatacataaaatatgactgaaaagctcaagcggaaaacaatatatttcctgctgttgccgctccttgccgcggctgcggcggggtattgtttctgcctgccccggacgcttttcgacgagcctttctcggcgaccgtctggagccgcgacggccgtctgatgtcggccaaggtcgcttccgacggacagtggcgctttttccctacggacagcgtgccttacaaattccgtgtcgcaattactacttacgaggacaaacgtttctaccgccatttcggggtcgatccgctggcgctcggccgcgccgtgcggcagaacctcgcttcgggaagggtggccagcggcgccagcacgcttacgatgcagacgatccgcctgagccgcggccggaaagcgaggaccttccgggaaaagatcgtcgaggcggtgctggcgacccggctggaattcagatgcggcaaggaggagatactcgccctgtacgcctcccacgccccctttggcggcaatgtgatcgggttggagagcgccgcatggtactatttcggccgcagcgccggcagcctctcgtggggcgagagcgccatgctcgccgtacttccgaactcgcccgcgctcatccatatcaggcgcaaccgggaacggttgcggcgcaagcgggacgacctgctggaacggatatggcgcggcgggcatatcgactccctgacgtgcgctctggcccggcaggaaccgctgcccgacgctcccgaaccgatgccgatgcaggcgatgcacctgctggggcggatgcgcgggggatcgctccgctcgacgctcgactatgacctgcagcgcagggtcaacgagctggcgctgcggcacaaccggcgcaacaggggcaataagataaacaacctcgccgtcgtggtgatggatgtgaagagcggcgaagtgctggcctatgtgggaaatgtctacgatcccgcggacaggagcgagggcaccagcgtcgatgtcgtccgggcgccccgcagcagcggaagcgtgctcaaacccctgctttacgccgcgatgctggacaacgggacggccctgcccacgatgctgtttccggatgttccgacttattacaaggactttacgccccagaacttcaaccacgacttcagcggcgcggtgcctgccaaccgggtgatcgaacgttcgctgaacgttccttcggtgaagatgctcgacaaatacgggcgcgagaattttctggcgctggtgcggaatctgggattcgggacgattgacaggagcgccgaccattacgggctttcgctgattctgggcggtgccgagatcacgctctgggacctgacgtcggtctatgcgatgctggccgccaagctcggcggcgggccggtccgcatcccgcactgcgatccggaggccgtaaagacggtcagcgcggacgacattccgctgtcgaggggtgcgatatggcttatgttcaattcgataagccatgtggcccgtcctgaggaggagggcgagtggcagtatttctcctcgtcgaagaagatcggctggaaaacgggcaccagctacggcaaccgcgatgcgtgggccgtcggggcgacgcccgactatgccgtcggcgtctgggtgggcaactgttcgggcgaaggccgtccgctgatgaccggggtggggtatgccgcgccgctgctcttcgacgtattcgggctgctgcccggcggggagtggttcgcggagcctcacggcgatctggaagcggccgtcgtctgccggcagagcggctgtctggcttcgcacatatgtcccgaccgcgatacgctgatgattccccgcacggctgccgccggcgaagtctgtccctaccaccggatcgtgaatctgagccgcgacctccgctaccgggtgaccgcggactgttacgacccggcgcagatcgtccggatgccgatgtttatcctgccgcccgcgcaggagtggtattacaggaagcagcatcccgactaccgtccgctgccgcctttgcatccgggactttcgggcagcggggcgggcggcaatccgatcgacatcgtctatccccagccggggcgcgtgctggtggcgcccaaatcgctcgaaggcgaggcgcagagtctggtcttcacggccatacaccgcgaccgcaacgccgtgttatactggcatatcgacgacaattatatcggtgcgacgaccctcgaacacaagatatccgtccgtcccgctcccggtgcgcaccggctgaccgttatcgacgaacacggggcgcggcaaagcgtctcgttcagctgccgctgaccgcagcctgtggcttcttgcgggtgcggaggggctttgcgctgggtgccgcgcagtgctttccgggggccgaagccggttttcccggagggtttgtacttcggcggacggtaatgggagggccggccgttattgccgggatcgcttgggaatggatcgaggccgtttgcgaatttgatgtggtgtcggttaaacaagaagccggacttaaaaaagtccggcttccttgtgtttgcaatccccgtcagcggatcacacggtatgcgggccgtgcgctgaccgtgcggcggtgcttggcggccgagttcaggtcgggctggtccaccgttcccttggtgtggacctcgacgatctccggctcggtcgtgattctgccgtcggcggagcatccgtacgcgaagacgatgtaggccgatgcggctttcaggcttacgacgttgtaagccgcgtcgcccgtgtagaagcagtcgtcgtccccgatcgtctgtcccgcttccagtccctgcatgcgccagtagaggtcgtagggcggatattgccgcggcgtggcgaaattgtcgcggtaggtgtcccgctcgtcgatgaacgtgatgtagctcgtgtttttgtccgaagggatcaccttgatcgcgagatcctgcttgtccacggttacgtcgatggtgaaggtgcacgcttcggtcggcgtgaaggctttggtatggaaaagcttgcgcgagacgcggctgttcgagaattcgccgttttcgttgcagccgaacgccacggcgtaataatcggtattggcttccagcgggtaaatgtcctccgagatatagagcggatcgcgccgcatgaatcccggcgaggagaatgcgaggtcgcccgttgcggtgaagtcgctccagagcaggatgccgtcgctcagctcgccgtaatagggccacaggtagcggtcgtcgatataggtctgtgcgaaatcggcgtcgtcataggccatgtcgaaagtcgatttcttgacgaacgtgcagaagtagggcaggtcgtccgaaggatggacggcgcacttcgccccgtaccacgaaatgtcggagagggtcatcagataggcggtgttgatgatttcgggggctttggtgctgaagggaacccgcatgagcggcgtgacgatgtcgagcgtcttggccgtcaggtcgtattttacgccgaccaccgagaggtcgtagctctcgccgggcgtcaggccgctgtatctgtagtcggttttggcgcctttgaagaagtaatccacatattccggtccgtcgacgatgtcggctttgaaacgcttctggagctgggtgatacatgcctcgtcgctcttggccggatcgtagggatagacgtaataggacatttcgggatctttcggcgtgatggcggccctgacgcgggtgtccccgacttcggtgatttcgagcgtgaagttgtcgccttcggttacgcccgtgtaatccttgtcgatcttgaccttcatctttaccagcgagctgcggtcgttgtcgccgaagtagatgacggcgatttcgccttccgtttcgcagacggcctcttcggcgggggctttgatcgtaagcacctcgtcggcgtacgaaacgacccagccggtgggcttggtcagcacgacgtcgttcacgcccacgctttcggtctcataggttttgttctcgccgtaggcgtaggtgccaagcgccggggccattttgacgagcaggtagaaatccgaacgcatggctacggtgatcgtcgtgccgtccatgagcgtgaaataggcgtatgcgccgtcctgcgtcacctccttgaagaacgagtcgctcacgccgccctgacccagcgccgaaaccggctggtccttgtcgtcggtgatgtagttccacgtcgcgcccttgtcgcagctgatgatccagaatcccttgtcgtcgatcttcagcaggggcacgacggcggcggccgtgacggggatctttttgccgtcggccagcagccattcaggctctccccctcccgatgtcagggtccagtagtagatctcgtccgtatccttcgcaacgccgattacgggtgccgcggcgccgtcttttccgtcggtgatcgtgattttggtgttttcggggtcggtgaagtagatcgtgtaggagccgtcggcgttggtttcgaccttcgagacgtagaccttttcgttgagtttttcgatcagcgtctgcatggccgaaacgtcggagttgagtttggcgacggcggtttcgagcgcttcgacgcgttttttgatgtcgttcacgctgttccacaggtcggtgtcgtcgtagtcgctgcatgcggcggcgaacgtcagcaggagcgcgaggctccaaagggcgaattttttcatcatgattttgaggttaggataaataagtgacggccctgcattgtcggttgcagggacgcgggaattgcatgaggggcgcggcaggaatttgcagccggagaccgcagccgccgttccgcgggcggacgggattcatcgatggacgggactttcggagttaggtgacttaacaaaggtagcaaaaaatccgtacattgtacgaatcggccgatttttgatcttttttacacccgatacttttgccggatctccggtggtattgacattacgcccggccgaatttcggccgggcgtaatgaatgttccgtgactttctgccgctcgtgtctggacggcggaaattgcagggacttattggttcctgaacaggctgcggccgttgcgtatcgtttcggcttcgccgttgcaggggatgatcgtgaaccggcaggcgtagtgtttctccagcagccggtactgatccgaaggccgggccttgagactccaagtgtccgtgccgccgacaccggtctgcgtacggtcgatattgacggtcagagcatcggccaaaggttcgacttcgttgctgtggcgcgccttgtccagactctcctgcgtgcaattccataccgatacgctcagcggttcggccccgacgaactgaacgccccggccgtcggaagctgtcagcgagagccagcggacgtcgcagcggttgccgttttcctgaggggtgatgtaactgtgcatgaatttttcgggcgtgctgcggtaaagtcccagaaaggcgccttcgcagcggtccgaatagttttcctgcggaccttttccgaaataggcgattcgctctagcgtgttggggacgcaggtttgcagtccgacgcgcagcggctccggcatccggtcggagatgtcgagcttgtaatccacggccaaggcccctgcgccgtcgagggtataggtcagcgtcagccggacgctgtcgggtatcgccttctcgacggtgaccgaacccgccgattcgtcgattcgtacggagacggtctgcaatctttcgggggcttctttccagcatcctgcgattttcccgacgcgccagccgcgccagtcgttgtcggtggaggcgcgccagaaattggggcgcagcggggcgcttatcagtttgcatccgcgcaccgagtgcgagacgacgtacccgctgcggcggtcgatctcggtgcgggagccggcggcgctcagcacgatgaactcgtcatcctgcgcgacgcttgccctgcctttgggcgcactccggaccggctctttgtaaacgggcagtgcaaactgctcctcggcggctgcgtatccggcttcggcgtacggcgtacggcgcttttcgcgggcctgcacccggagcaggtattcggcgccgggttccggtttgaagagccggaatgcgatcgcggcttcggagcggcagccggcggcggtcggcggcacctcgaaactgccgtgctggagcacgcccttgtcggtcgagatttcccatgtgaagtcatagcgttcggtcccggcgaagaaattgcggttgcggactgcgatctttccggccgcaaggtccgaagccgtgaactcgacgggctggaagacatatttgcactccagtgcggcgggtttcagcgtacggtcgggattgacgatgccgttgcagcagaaagcggcgtcgttatgttctccggccggttcgaaatcgccgccgtaggcccagtaggtgcgtccctgcgcgtcttttttcaccagtccctgttccacccagtcccagatgtgtccgcccagcagtccggcgtgtgtccggatgagtttccagtagtcgttcagtccgccggtggagttgcccatcgaatgggcgtattcgcacatcatcacggggcggtcgagcatcgggttgagggccatctgttcgagctgcgcggcggtcggatacatgcggctgaggacatcgacataggcagggtcggtggggttgccgccgttttgcggcttcttgacctgtccggcggcgggctggttgtccgcagccattacgctggtaaaggctgcggccgaagtccgtttcagcggaacgtaaagcgggtgcataggctgtccctgcgctccttcgtaatggatcaggcgggtcgggtcgtaatctttggcccagcctgccgcagccgcgtgcgccgggccgcagccggattcgttgcccagcgaccacatgatgaccgacgggtggttgcggtcgcggatgaccatccggcttacgcgttcgagaaaaggcgtaatccattgcggatcgttcgagagcaggccgcctttgccgtgcgtttcgatgttggcttcatcgacgacataaaggccgtaacggtcgcagagttcgtagaaataggggtcgttggggtagtgcgacgtgcgtacggagttgatgttgagccgtttcataaggcggacgtcctcctccatcgattcgcgcgaaacggttttgccgccatattggtcatggtcgtgccggttcacgccgcagagctttaccggcacgccgttgacgagcatttcgcggccgcgcaggcggacgtcgcggaatccgaccttgcagctgcgggcttcggcgagttttccggcggcgtcgcggagagtcagcaccagcgtgtagagtgcgggattctcggcgctccacttttcgggtgcggtgatacgctcttccagcagggcgaaatagacgttgtcgcgctggggataggcttccgcaagaatctcttcgacgggcagcgtcagttcacgcccggaaggggttccgtcgggtgcgtaaagccgtgcgccgagttgccagcctgcggcggaggccccttcgcgcaaatctattgccggacggatttgcagcagcgcgtcgcgcatgtcggcgtcgaagatcgtcctgacgccgaaatcgccgatcgcggcatcgggcttggccgagaggaagacctcccggtgaatgcccgccatgcgccagtggtcggcgtcttcgagatagcttccgtcggtccatttgaatacttggacggccagtctgttctctcccggctgtaaaagtccggtgatgtcgaattcgctgggcaggcagctgtcttccgcatatccggccaaggcgccgtttacccagacgtagaatccggaatagactcccccgaagtgcagggtcacacggttgccgctccacgcttccggcaccgaaaaggtgcggacgtaacagcccgtgggattgtcgcgcgtgatgtagggcggcttgaattcgaagggatagacgacgttggtatagatcgggtagccgtagccctgcatctcccagcacgaagggacgggtatttcgtcccagccggtcaggtcggctccggggagccagaaatccgcggggcttcgggagacgtcttcggcgaaacggaatttccacatgccgtcgagcgattggatgcgcgacagcgtgcggtcgcccgcaagggcgtcctgttcggagctgtaagagtaggaggtggctcgtgcgggaagccttcgcagggcgttgacgaattggtcggccggagcgttccgttcggaagcggctgcggcggtgcagagggtcgttccgcagaggagaattgccagaagtcggttcatcggtgaggttttagaatacaaatttaataagttttcgcattgcgatggtcgccgtgccggtaataaacgctccgtttgagcggaatctgcatgccgccggtcgtttcgagccagtcgtagaggtcgttggccagcgagcggatcgtatcctgcagctccggacggtcgatcaggttcaccgtctcgtaggggtcttcctgcaggtcgaagaactcgttggtgtcccagatgccgtggtaacggatgtatttgtagcggtcggtgcgcactccgaaaacggtcggagtctgggggaacgcatattcccaatagtattcgtaatagatgcgcttgcgccagtcggctgccgtgccgcccttgagcagcggcaggaacgactcgccgcacatctgcggcgctttggcgagtccgcaggcggccatgatcgtgggggcgacgtcgatgttctgcaccatctcctccaccgtgcggcccgccggaatgagttcgggacagtaggccagcatcggcacgcgtacggagggttcgtagaagttgcgtttgtcgatcagtccgtgttcgccccacgtgaagccgttgtcgcccatatagatcaccagagtcgattcgtccagcccttcggcctgcagaaaatccagcagccgcccgatggcgtcgtccatgctggtcaccgtctcgcagtaattgcggaagtcctcctcgtacggcagtgcgccgtgatactggtaatcgacgccgtgccagctttcccgctggttctttacccagtcggggagccggctctcgccgtaccagccccgtcctgcgagcggcctgccgtccgcatccttgccgggcagtcgggggattccgtactccggcacgttgaacgacggcggatagaccgctttttcgtccttgtacatccctttgcgggagggcgaaggctgaaacccggagtgtaccgatttgtaggagaggtagatgaagaacggaccctcttcgttgtcgcgtacgaagtcgatggcgtggtcggtcagtatgtcggtggagtaaagttccggatcgaactttacgcgctcgccgttgatgttcagtaccgtgtcgtagtaggtcccctgtccgcggaatccctcccaatggtcgaatccgggctggggcatgtcgtcctgattgcccatgtgccatttgccgaagaaggcggtgcggtatccgttctgctggaggtactgcgggaaaaagaccagatcgtcgggcttcggtgcctgattgtccacgacggtatgggtgtgcgtaaacagaccggtgaggatggaggcccggctcggcgaggagagcgatgtggtcacgaacgcatttttcaggcaggcgccttcgcgggccatgcggtcgagcgccggggtctgcagccacggaacggctcccgtgaaccccatgaagtcgtagcggtggtcgtcgctgaggatgaagatgacgttgcgcggtttttcgccgttgcgggcgaccgggaccggagcggccggtctggctgccgcctgcgaaatggcgagggctgcgaagcctgcgggcagcgtgattcgtttcaggtgcatcatagctttatgattgtggtttcaggattgagtgccatacattcgatgtgtcgcaggatttctgcggcatcttccggcgccgtaagcgtgacgctccggctttcgcccggcagcaggtcgaaatagttgtcggagaagattcccgccgtacccctgtaatgcagggtgagattcttcgccagtttgtcgctgctcaccgtaatccggcaggtcgctgcgtcgggcttctcggcgcggatgcggaccgccgcggccgggagtgcggcgtttttcatcgtctcgaaatattgcaaagtccggtacgcggtcttgtcggaccggaattcgcagaccagcaccgcgttgccggggtctgcaccgtccagataatcgcgtacgccgtaccggagcgcacgctgcgatgcggcggctccgacggtcacggggtgggagctgcttttcagctcgttgcctgaaaaatccgtcagcgtgagtttcattactccccggagcggcttccgcaggtcggagacgacgaaaatgtcgagcgtatcgccttggatgtaaggggagacgacgaccggttcgcacgctttccttacaaagtagtgcatggctttccaccggccgtaatagtcgattcccgaccagctggcgcagggccatacgtcgttgagctgccagatgagcgaccccatgcagtagggcatgttgcgccgatgcgcctccatcgccgtcttcatcccttcggcctgcatcaattggctgaggtacagcgtgcgtgcgaaatcgtcgctgcgcaggtatgaccgatcgacatattccagcatccgggcgtctccctttttccggtcgccctgatgcgacgtcatggacggagaggcgaggcggcgctccccttcggggatgaaacgctcgaccgaggagagttcggggtaggattggagtccgtattccgagatgaaacgggcgatttgggtgttgtaggccgatatggggtcgcctttgtgccagacgtcccagttgtgtacgtcgccgtagcgccagcggtccgccgtatcgagcccccagcccggcgagggcgacgagtgccagtagggtacggtgccgccgcaaaggctgtccaccacgccgggcaggatattccggaagatggtttcgtttacgcggtcgaactgttcggcctcttcttccgtatagaatttgcggaaccggctgttgcgtttgtcgtggggtttccatgctacgtctatttcgttgttgccgcaccagaggacgagcgacgggtggttgcgcagccggcgtacgttgtcttcggcttcggcccggatgtcggcgtagatctgcgccgatccgggatacatgttgcaggcgaagacgaaatcctgccacaccatgatgccgtaccggtcgcacatttcgtagaaatcgtccgactcgtacgtgccgccgccccagacgcgcagcatgttcatattggcttgggcggcgctccgcacgagaaattccgttttctcccgcgaaatccggggcaaaaacgcgtcggccggcacatagttggagcctttgcagaataccgggatgccgttgatctcgaagccgaaaccgcggccgcggccgtccgcatcgtcgcggcagcggagcgatacggttcgtacgccgcatctgacggccgtgcggtcaagctccctcccctctttttccagcaccagctccacgtcgtagaggtaaggctcgcccattccgttgggataccacaaccgcggagagggaatctcgaacggctcttcgattgaatgcgtcccggcatccagcgtcttgtctgccgtgaggatgctcttgccgttcaacagtatccggatgcgatagcagccggccgcatccgtccgtaatgcggccgatgcgctcatctgcgcctttcgcggccctgtcgagcgggtgcgcacgtggaaatcctccacgcgggcttcgttccacgcttcgagcgcgaccggacgccacaatccggaggtgacatagcgcggcgccaagtcccagccgtactggtagcccgacttgcgggtgaaaacgcttaccttgttggggcccagtccgcccaatgcgccgaggtcgttgttggcggtgagacggccgccgtaggccgccatgtttttgagcccctgcatgaccggggagtgaaaaacgacgtgcaggcggttgttccgggatttcagcaatcccttgacgtcgcttttccatgtgcggaacatgttgcccgtgcggtgaagcagttcgccgttcagcctgatgtcggcatagcagtccactccttcgaagacgagccgcacgttgtcgtacgacgccaattcgggtgcgtcgaacgtgcagcagtactcccagtcggtcttgtcgatccactgcagatcgctctggctgctgccgtagaacggatcggggatctgcccgtttgccagcaggtcggtatgcacggttccggggactgcggccgggagccattcgccgagtccgtattgccggaatttccatccttggttcagttcggtgcggccggcggccgaaatccggcttcccgccgcggcggtcagaagccataggatcaggagaagtcttttcatcgtttgtcgggttgggttgtcgcaaacataactcaaacggccggaaatgatggtcagcgatccgtcaaaaaataacacaccgccctgatgcggtaattttccgacgctgaaaacgcgctttcggcttttctgttagttttggatgaatccgtgcttcgtgagctgcccggaatttcgtaatattgccgtcgggacaaaacgtatgcaggtatgaaaacaacacatctttcaggacttttgaccaccgcgggactggtgttcggcggcgggaattcgtatgcgcagcaacggccgaacatattatggcttacgatcgaagacacgagtccttatgatttcggctgttacggcaacaggcatgtcgccacgcccacgatcgacagtctggccggagccggcatccaatatatgcgggcccattcggtcggcacccaaagctcgccttcccggtcgtgcatcatcaccggatgctacgcctcgactttcggcatggagtggcaccgctgccggtttgccacgccggagactgtttttctgcccgactatatgcgtgcggcgggatattactgcaccaacaaatccaaaaccgactacaatacgctgtgtgacaataaggccatgtgggacagctgcggtccggcggcgacatacaacaacccggcgcggaagaaggaccagccgttttttgccgtattcaactcgatggccacccatatggggcgcatccgttcctatcataccgaccagcggcgggatttcgccctcgaagggctcgatccggcgcggctggaactgccgccgcatgtgcccgacattccggaaatccggtctgacttcgcgtttcatatggaggggtcgcaggacatcgacgcatgggtcgggatgtttctcgacgatctcaggcggcagcggctcgatgaaaatacgatcgtctttttcttcagcgaccacggaggatgcctgccccgcggcaaggggttcgtctatgagactgggacccacgtgccgttcatcgtctacctgcctcccaaatggagacatctggccaacggtcagtccggccggaccgaccggctgatcgggttccccgatctggcgcccaccgtactctcgctcgccggcatcgaacctccggcctatatgcagggcaaggcgtttctgggcctacggcggcgatttcggaagccgcgagaaccatgacgccaacttcaatatcaacggaatcatcaatcccgaccggagtctcaagccggccgcggcggaggcgaagcatgtcttccagccgctcgaaatcgcgcagccgcggcccggagaggattttttcacgatccggaaccgcaatttcttcgtttcgaccgatgagtatgttttcgaatggcgcattacgtccagcatgggcgcgacgctgggaagcgggactttcgaagtgccgcgcacggaagcgggagcctgcacggagtgccgcgtggggtacaaggcgccccgtcccgaatccggcgtcgattattggctggatatcgtttaccgcctgaaagaggataaaccctatgccctgcggggattcgaggcgggccgttaccagttcgcactgcccgctgcggcgcccgtgcgcgctgcggccgcccgcagtgccgtcgtcagccgtacggaacgttcggtgacgctgactgccgggagtgtgaccgcgacggtcgatgcggcgacgggatatctgtcgggatatgcggtgcggggctgcgagctgatgcggagtccgctcgtaccgaatttctggcgggcatccaccgacaacgaccgccggggctggcgtacgcgggagcgcatgggcgcatggcgcacgatgcctgagcggctgaaactcgaaagcctgaatgcggccgacggtgcggtgacggccgtcgtgtgcggcgggggcgtcaggctggctttgcgctatcggcttgcggcggacggggagctggccgtttcgtacgacctgcggatcgcagacacgcttcccgaaccgctgcgcatcggtctgcaggctctgtggagcggggagctggaccgctatgtctactgcggccgcggtcccggagagaattatgccgaccggaaggaaggctccctgttcggggtctactccggcagtacggccgatttcagtcccgcctatatctatccgcaggagtgcggcaaccgctgcgacgtccactatctccagcttgggggcaaaggcggcggagtagttttcgccggccggcagcctctgtgcgtctcggtctggccctgcacgcaggaggcgctggatgcggcggagcatacgcacgagatcgtgcggctggacgacgcatggctggtgaatgtcgattgtgcgcaggccggcgtgggcggcaccgactcgtggagcgtgaaatcgcgtccttcggaggcgtaccggcttttggagaagcactacggatatgaatttgtaattgctcctgcgggaactccggccgatgcggcgcggacgagccgccgggtggcgtataaaaatgaataaacgatgaaaaagtggttgatggcgttcctactgctggccggaacggccggggtgcgcgcccagcaatgcgatgtgccgcagatcggcgctcaggtttttgtagagccgggacagacgccggaggatatcgacggatttttccgcctgttgcacgataacgggatgaaggtggcccgtatccggatgttcggggcgcacatgtaccgcggcggggagtgggatttctcgctttacgacgaggcgttccgtgcggcggacaaatacggcgtccggcttttcgccacgctgtttcccgtcaccgacgagctgaacgacgtgggcggtttcaaattcccccgttcgaaggcgcacctgcgcgaaatcgacgattatatcacggccgtggtgtcgcatttccggcagtatgaatcgctgtggacatgggtgctgcagaacgaacccggcagcggcgggacgcgcgtcgccatgaccgacctcgcaagggaggtctatgaccgctggctggcggacttcccgccggaagagcgcggggagggttatctgaaagccgatttcacgcaggagaagttcctgacctactatacgacgtggtatctgaaccatatcgcgcagctggtcgaacggctcgatccgcagcgcgggcgacatatcaatccgcaccagattctgggcacgctgcccgattacgactttccggcctactcgaaattcctcacctcggtcggcgcgtcgctgcacctgagctggcatttcggcatgttcagccagcgcgaatatccgctcggcgtctccctgatgtcggatatcatccgtcacaacgcactcggcaatccgttctggatcaccgaactgcagggcggaaacgtcaccgccagcggcaatgttccctactgtcccacggcggcgcatacggcgcagtatctctggacggcgatcgcttccggcgccgaaggggtgatcttctggtcgctcaatcagcgggcggccgtcatggaggcgggggagtgggggctgctcgacttcctgcgcaggccctcggaccgtatgctcgaagccgcgaaggtcgcatcggtattgcagcgtcacggtgaagagttccgggagttgaagcctgcgcctgctccggtgacgctcctctataacatcgcttccctgcgcattcagcggcgcaatgccgaaacgctcgcatccggtgaggagggacggcaggcttcggcctgcatgaaatcgctggccgccgcctatgaggccgtctcggcatggggcgttacgcccgaagtggccgatatggcgaccttcgactgggacgacgcggcgggccgtacggccgtgatcccgcatatggtggcgctgccttccgaattccggccccgcatcgagtcgttcgtccgcaacggcggcaagctgatcgttacgggattgtcgggattctacgatgaaaatatgcgatgtctgtttatgaacggcttcccgctgaaatcgtgtttcggagcggaggtcagcgaattcaaagtcgccggggagtatttcacgctgggcgaggagctgcctgcgcatctgtggcgggggatattggtgcctgcttcgggcgagacgatgatgacggacggcggcgatgtcgcggccgtgcgcaaccgctatggccgcggcgaggtcgtgtgggtgccctccccgatcgaattgggcggatatcaccgcgatatggttccgctgacggctttctacgggcgggagtgccgcgatgccatagacgcggctccggcttcgttccgcacgcccgaaccggacgtgctgatgcgcaccatgcgcaaagagggcgttttgacgaccgtgattgtcaacaagcgtccggaaagcgcggccatacggctgcgtacgggtcgatacggcgttccgcgcgtgatctacggggatgcctcggttaagggggcgcaggtcacggtcggagcggatcgctgcgccgtggtggtctggagcaggtgacgatttgaggataagcccttcggccgttcggataggaatgcgcatccccgcttgtttgtcggcggatgcgcattttttcgtgtgaatacgccgagagcggccggaacaggccgggattgttgtttcggacatattggagtccggctgccggcggggatttcacacaaacaaaaatccccgtaatcgtaagattacggggatcaccaagtgcccaggacaggagcaatggtatcaagctaagatatataaataagcaagaaaaacgcgcatgaagattcttcatgcgcgtttttttctgctaaatcaatatttttacgggataaattttgccgccaatttactcattttatcattaatttttgataagttctttctggttttatctgccttaaagcggaaccgctccatgaagcggcggccggcctttaggccgtctatttcccgcgcggatcttctatcctttgcgcggtctttctcatcagtttttatcacggcacttgaagtactctccctggtacaaagctaatagtgccagtcttgacacatctcccttcggcgcacttctttgaaaaaattaaccccggctccaccggggcgtcctgaaataattttttcaaacaactgcttcttcgctcgctttagtcaccacatttctccgaactgttagactggccctatatgttttgtaccagggagagggaggtaacccaaccgacctcacccagagttctttgacgtacttgaggagctaataacagcgggtacattcccgcgtctatcaattcacaattaaaactccggcgcaggagtataaagtctgcaaagtattatggaaaacagagcgaagaaatgtattgaatgtggcaaaacgctcacattggattactttcggagaacgccgttatctcctgacggctatgccaagatgtgcaagttatgtgcaaatatcaagcgcacgcaaggcaagaatgaagaacggaatccggcactgctaaattttaaagcacgagaactgattgacgaactccgtgcgcgtggttatagggggacattgagaataacaaaggatattcaggtatagccggtgactgaagagccggtttattccggctctcttttgcttttgtttgtactgctgtaccatgccccgccagcggggccttgatcgctcctaaaaagcacgacttgcagggcgttgcaagtcgcgcttttctccacgtcgcggcagtgcacccctcgcgttgcgagggagagcggtattttctctctgggtctgaccgggctgcggttttacccggcctctgtcagaattcaagctttctgcgacctgaagggtcaccccttacacgttgccttcagagcctttctgatacaaagtagtaaccctgcattttgccgggcaatgaacccgcgaaatattttcttagaagtcccttcgggagaagtgtttatgatgaaaaaatttaccccggcaggccggggcacactgaagaaattttttcaaaaatatttcccggaacccttgcgccggttcagcggtagagagcggccgcctatgcccattccagaggaacgggcggccgctccatgttcattacaaaatgtcagcgtcccatacgagtatcagaaaggctctgaaggcaacgtgtaaggggatgcccctcgttctttgaaatcttgaaaacatccatcggcagggaaatcacagcccggcaaaccttcgagaaaatgatagttcgatagaaaggataaagggcgtgacgaggatgttagcgagttttcaaccacaagttctttgacgtattaaccagctccgctcgatgtggtcggcggatggcggggagcgaagccccagcggagcgcaaatacaaacattttaaaattttaatgctatggaaatatcactggatgattatttagggcaacgagggctgaggtctccgataagtgggtacatggatgacaaatggcgaaacatgcgcttaacggctcgggggcaaaaaagattcgagaaagaggcggaggctgcaattattgaatacagcaagctacgcaaagccgccatagacgaatataacaatttggtgaaatcgggcgagataatcccgccgcatgaaacgaaattggaagccctcttgagtgtggccagaggacacccggataacgaaggaacacaagcagcccgtaggttgctgaaaaaaagatatggtataatatcctggtaatatgccgcataattcaaattcttaaaattacagttttctcctgtttaaaaaaagctatcccaatgaattcaaacgataaaatccgacttttgtacatcgaccttttctgcggtgcgggcggcacctcgaccggggtacaccttgcgcggcatgccggagatccttgcgccaaggtgatcgcgtgcgtgaaccacgacgccaacgccatcgcgtcgcacgctgccaaccaccccgacgcgctacactacacggaggacatccgtacgctggagttggggccgctcacggcccatgcggcccggatgcgccgccagtatccggatgccttcgtcgtcctctgggcctcgctggagtgtacgaacttctcgcgggccaaaggcggccttccgcgcgacgccgacagccgcacgctggccgaacacctgttccgctacatcgaggcgctgacccccgattacatccagatcgagaacgtggaggagtttatgtcgtggggcgatctggacgagaggggcaagcccgtcagcagggatgccgggcgactgtaccggaaatggatcgacaacgtgcggggctacgggtacgacttcggccaccgcatcctgaacgccgccgacttcggggcgtacacttcccgccggcggttcttcgggatcttcgcccgccgcggccttccgatcgtctttccgaaaccgactcacaccaagaacccggcacagggcgacctgttcggccagcagcttcgcaagtggcggccagtgcgggaagtcctcgaccttgaggacgagggcgagtcgatcttcgaccggaagcggccgctggtcgaggcatcgcttgcccgcatccacgcggggctggtgaagttcgtcgccggcgggcgcgaagcgttcctcgtcaaatacaactcgatgaaccagtgcgggaagtatgttgcacccggcatcgacgaaccgtgcccgaccgtggcgacgcagaaccgcctcggcgtagccaaggtgtactacctctgcaagcacttcggcgggtctccggaggggaaatgcactgccgtcgatgcgcccgcgggcgcgatcacctgccgggatcaccacgctttcgtctcggcctactacggcaacgggttcaactcgtcgatcgagcagccgtcaccgacggttacgacgaaagaccgttttcaactggtgcgtccgttcttcgccaactactattccggcggcgtccagacgtcaggaacggacggcccggctccggccgtcatgacgaacccgaagcagcggctcgtcgcgccgtggatcatgaacaccaacttcagcaacgtcggcagttcgctcgacgctccggcccagaccgtgacggccaaccgcaaatggcaatacctgatgaacccgcagttcgcctcggcgggtgccgctaccgatcggccgtgtttcacgctgatcgcccgcatggacaagcggcctccgcggctggtgacggccgaagcggacggcgaggcgctgccctcgttcatcaggctggaggacgaaacgttggtttacgagatttacccggaagatacgccgatgctggtgcagataaaggagttcatggcgctgtacggactggtggacatccggatgcggatgcttcgtatcccggaactgaagcggatcatgggcttcccggagaactacgtactgatcggcacgcaggaagagcagaaaaaatttatcggcaacgccgtcgaagtgaacatggcgcgggttctctgcgaggcgctggtggcgaaactttacgagttgaacatcgtgccgcagcggtttgcggcgtaatggcagtccgctcatacggtgacagctctggagcattgcttcagagctgttgtcgtttaagatatcctcctgcgggatgctaaaatgtaagttggggcagttcagtgttaccatttttgcgttttttaaattcagtgttaccatttttgcgcgcgaaccccctttcagtgttaccaattttgtagctctgtgttaccatttttgcgcttgtataccttatatataatcagaaaaatatatttatatatttttcttcttttattcaaaatagaactcaaaaaaaatgaactcaaaacgcgcatacgcgcgtagcgcgcacgcgcgagggaaaaggtattttgtttattcgcaatggggaaaagggtgttgcagtttcagtttttcgtgtctacctgctattatgacaaaaattgttcttaatgtgtgttaccatttttgcgcttgaaatattgattcgggggcaaattcccctcttttttatggtctgtgttaccatttttgcgttttttgtattgcaacatgctgatatttttgaaataacataagatatttgggggtgtttgtgtgttaccatttttgcatattctatttgtaatttactgatatacatatttttatgtatattttttgagttttgctctcatcagtgttaccatttttgcgcttctattacacaagatattgattaactgttaattatccaatatctacctcgcggtgggaacaggctgtgttaccaattctgcgtttttgctttataacatattgtattttaattgcttatgtgcttatttgttgcgaaaaaatagtcagaagcctaatctgctgttgctggtataaaaaattgcgatctgcatgtttcggtgaaataaaaagtgtaagctgcctgttggttgttttgtcagttgagaccttatcgagacaggagcgtctatgtccagtgccttagtttatgttcgggcttgctacccgttgatgattcctgatgaaacctgcacggctataacccctgtccaagcccgaggcatttgctttatcggcaaaaaaatgctatctttgtcgttggaggtgtaaggtatttgccgataacggcagaaatgaaatcgtatgaattatctttcggtcagtgagatcgcccgaagatgggtcgtgtcggagcgtacggtgcgcaactggtgcgccgtaggtaagattaagggggccttcttaacgggcaagacatggaatatcccagaggatgccgtgcgcccgcggcgcggcaaggagaaaccatacagcgacaatccgctgctcaaccttctgaaagagcagaaggacatgcagctccggggcggcatctaccaccgtgttcagatcgagttgacctacaactccaaccatatcgagggcagccggctcacgcaggagcagactcgtcatattttcgagaccaatacgctgggcgttacggatcaggcggtcaacgtggatgatgtgatcgagacttcgaaccacttccgctgcatcgacctggtaatcgacaaggctgcttccggacgcctgaccgaagcattcgtcaaggagttgcaccgcattctcaaggcgggtacctccgacagtcgccgcacgtggttccgcgtcggggagtataagaaatttcccaatgaggtcgggggacaggaaaccacgccgcccgagcaggtcgcagcgcaaatgaaggcgctgctttcggactataatgcccttacgaataaaactcttgaagacatcgtggcgttccaccacgcttttgagtgcattcaccccttccaggacggcaacggccgcgtgggtcggcttatcatgttcaaggagtgccttgccaaccgcgtcgtgcccttcatcatcgacgaggatctcaagctgttttactaccgggggctgcacgagtgggatcgagcccacgaatacctgttggatacctgccgcacggctcaggataactttcgggcggtgatgcggtatttcaaaattgaaatgtgagataatatagataattatggcaactgaccaacctgtactgcactttccggtaaacgataatccacaattaatgttatttataacatttttacgtttgagtgcaggtaaaaaatggggaggggcgaaaccgcccctcttcttatatttttcgcgccttcaggaatgtggatgatgtcaccctgaagaacagtccccgttccccgttgtcttcgaccatttcgatcagcaaaaccctgtcgttggagaaattgaatttgtcgaatttatagatcacggtcatcgtctttttgtactcgatggtgtgtgccgggacgtaactgcctgccggcgacagatctgtccggtcaaaggacgtcattcggcctttcttttttgtgacgattgcgaagccgcagtagttgtaggtgtacggcagctcgctgttattggtgatgtccaatttgaaataaacgtaattatctctggtgtatatgcccttcaggaatacttccattgctttgtccgcaactccattttgggccacgatgaaatcccgctgcttcaggattgattcatattctccggtttccggatgtgctgtggccggtgccggtattttatctccatcaagttgtgaccgcaatggggaagatggcttcagtcctgcctcggatgggtctggagtattgacgtagattctgtcggcaatgtcgatgatgtaggcattcttctcgctcttttccgtataacataggtcgagcatgtagcagctcgtatcctctgtaatgatggataggttggtactcggaaagtctgtcaggcattggatatagaggatattgtcatacttgtcgagggcaaagtaattgggattgaatcccccgcggatcttggcgatcttatccgggaagataatttggcagactttgttttgctggagaggtatttgttcgggttttgctccataccccgatgtggccaaacaaacgaatacgatggcgaaaatataatttttcattacttaaaagtgttatttataacatttttatttcggcaggccgggccggagaaagaccttttggttgtcgaagaatgatacatatgtttctttgcgtgagcgccccgcatttgaaatgtctcggacgacggagccgaccagtccgccggtcactgtcgagatcttccggtcgatcgccgacgctgcggccgagcttgtggcatcgcccacgatcttctggttctggtcattttggactggcagtccggggctgccgtcttcagagtacccggaaagctccagagaatatattgcagcgccgaattttatggattcgacagtgacctgtacccgattattgtttaatgcgatctgtgcatatattatggaatttcggggaatgacctgcccgtttgaaagaattaccgatgtgtcgatacgcagtgccagcctattgccgaccatgacggtttgcggcccgtgtatgaaggccggaatctcactgggtgatgcaatggagactgctgcatcggaatccgtgttcattggatcttgcagatccgaaaggttgaatccttcttccatcagtttcttttgctgggccaggatttcatcttttgtcagcggacgcgatggcgcggtctgggactcgtctgtggccgtggcattgggttgattctgcgactgtgaattgtagatcgcatcgagttcctgctggatggctgatttctccatggcgtttcgttccgcggccggagcgtaactcgtcgttgtgccgggaacttgtgaactctgcgcaacaggggaaggtgtttctcccgtaggcgtttctggaacaaatatggcatcgaaagatatttttacatcttcaggcactgtcttgctctggctatttgcgagtctttcctgatagagtttttcatcggtatccccttgtgtccggggtgtttcagccacaatgtcaaatgcaatatcttcagatgccaccctctcatccgtacttgtgttcgactgtattgatagtactcctcggattataagtccgaatatcagtataagcacaacggccatacctaataataagattattttttgcttattacgatcgtaccattttttgaatttatctgtcctgctgctgtccatcctgtcgtaattttagtgcgtaattgacccgggcaatgtattgtcctgttttaacatgagcatgtcgcggtcgctttttactccagccgaaatttccggcaaagaaagtgtttatggtgtagatcacgatcacgaataatatgtcgataatgatgaagagcctccacatcgaggaggccgcagctccaagaacgcttgtgaccagtactgcaagcataaggagaaatatccccagcggaagtttaaatacggggggataaacgcaaagtctgcatctgtatcgtggtctctggggcattttagagtttttgcgtgatgaaatctgaaatcgacgaggcgaacaacattaccgaaagaccgatgatgagatatcccagctttgttattatatccttcgtttccttctgggatatctcttgtccggataggatgcttttggtggccgtactcaaccctattttgattacagcgataagggcgatcaagccagccacgatttgtacgccatctttgattacaccctttagctttgtcgtggctgctatgtcctgtccaccggcagcccacagaaagattgggatgaaaagtaaaattggcagtaaaacaatgattttccgtttcatagtgctattgttttaaattaaagtttttgaagtcgattttcgtgatagcgagtgcatgcggattctctttcgtcctctcttttgtttcctcgagatagaatgtgatggatacttcgtaaatttgcggtttactatggacttccgaggtgatcgttaccgtgaatatggcgtctaccgtcagcggattctctgcgacacacttcaagtcggttatctgcacgctttgggaaatgttgtattggcgcatgttcgtaaaccagttgtccttgtcgaaccgctgtttgagtgcgtatattgacgagtttccaagggcataggtgctgcttatgcgttgctcataggtgtatttgtcgatgtcgaagaacagcatgatgaagagccgtacatgggcttctgcctcgatcttgcggaactcggcggccctaatccgggttgcgatcgctacatcaccatcctgattgagtatgtaagccgaggaggtcgcctgcaatatcctcgtttcagtgtggatatacatggcggtcataaatatcgcgcagacaatgagtatcgcgatgatacctttgcgatagaagccgactgcgttgtcgagctgtgtcagatgttcaaagattttcatggtctattattcaaagtatcgtccggatactccttttttttgtttcagataagtttccttgaagaattgtccggatgttaccgaacgactcttgagtattccccaagtcatcgcgccgacagtcatgaacgaagtggtaatttgttggggaagttgagctgcggcttcagaaccaccgacacaaagaaccgtcagcgtcggagcgcagagataggccgctccgaaggcgaatgccattaatgctattcccaattgcgctacggaaagtgaattgctggcgacatcgaagagcaaaaggttctgcaatatttcgatggccgcgatgatgaaactcatcatcgttaccgttatgtaactttgccaccatgcgccgatggtcttttctgctccgtatataaaggacagggcgaccgcaacggggaaagtaattcgtagcaatgccttaatgataagtacaaaaaaggtaattatcagcttgcagaatgctccgacgatgagacatatatttgcgagcaatttgaccaagcctcctttgatcagactccaaagcgattcttttttattgtcctcgttgaagtccgaagcattgtctatttttgctccattatagttccttttcgacacccgggcttgggcgcgtttaacatttcttatgtcattttcactcagtgcgtactcgcttgcctcaatgcggccgaggccatcgcttttgtcaattgcgacctgcatagcatcttgtctgttcggatacagatattcaatggcggtttccccaaaaaaatcaaccgcaggtattatgcaatagccgaatatgagtattaggaatagatgtacgcacctcattatctcagcttgtaaatcttttccggttttttctctgagagcgaataatgctccgtttactataaggaagaacattaatcccgctccgaggacgccataataactgcctacttctgaggagaggagcgttaaaaagtttgaattgaagtaggtttcgaactgtgtagtgaacgaattgattatattcgcgagaccagaagtgagtattgggttcattttttccgatttgttaaatattcatcgagttcgtacatccccagttcgtgttgtttgcgattgactgaacatatgagataggtgtggtaactacaaatgatgccatatgtatcgtccatttgtttacggacatcatcgagatatcgcgccatttcagtgagtgtggtttgtgcgccggattgcatactattgagtaagtctttcagatcacccattgctccgtccatgatattatttacggacagtttcccatcttgatccgcttggccgaagacgaccttattcagaaccgccacatggtagctggcctcttcgtcttcgaaataaatgctgttgtcatatatatattttatggtttcgagatactcgatgtatatctcgtgggttcgtgacgagacccggtatagtctgtttccggcgttatagactttggccagagaacttgtgagctgtattgattgctgggtaatttttttcaggtcggatatttccattcccgacgcttcggacagggcttccaatgctccgaggtacggagtgaggaatcctatcagagctgctgcatcctgcccaaattgcgcttttgttgggagtgggtgtagtagcacgccggccagaatgatgatgagtatttttttcataggcaaaagtgttatttataacatttttacattacttgttttgggcatggcaaaaggcattgatggccatctgtacattgccgttatattggtcgatgtatttctttatcgtagccttgtgttctttcgatgtcgtataaagggcgagttcttcatgggaaagttgcacgatatattctgtggtatgtgcgccttgccggatacatatcgcgtggtcggatttcttcattgacaggatgatctccagatcccgggatgtgagtgataattctgattgatatttcttgaggttagcctccttgccttcatgcgagaggaagaacatggtgtcggaattgttgatgatcgcctcgtggtgttccgagtgtataatgtcgggcacgtcttggacgatcagtccgatgccgctgtcctcttttctgatcgttttgtacaggtatttgatgaaatccccgaagtacggatcatcgaggagtttccatgcctcgtcgagccagaagattttatatttcgtgggggcttcggccaatactttcttggccatgagcataaccagataaagtacaattttgtagattgatttaacattggatacagctttcaattcgactatgcacatgcgcaactggggtgcgaggttgagtgaattgttttggctgttcaacaaaagcgaccattctccttctttgctgtattgatgcaatacgagttcgaaagaatcgaaatcgaaatatttgtcatttaaagtccctcgctcgtgctgctgtatgatatacttatagaaggaatcgaaattgacgtactctgttcgctgttcataacggagagagtagaaatcgtacaatagctttttgatatatgcagttttgccgggatcgtcttttaatccgagtccattgttttgatcccataacaggagtatcaggcttgccagcatttcgagttccggaaccaatagtttttccgaatcgtttttcggatcgacgaacgggatcagaaacgggttgaacgataactcctctcccgtaggcgtcattcgcatatacccggatttctctcccatgagatagtgcagcatttcatagctttccccatcgtcgagaatgaagttgaaatattcgtcggtttggacaaggcccgagatcaatttgtttgcggacaccgatttcccactccccgatgggccgatagctgtaaaatttcgattagagatctgtgagtttcgcatggtctcgttgaagatatcgacgacgacaggtttcccatgtgtatcgttcagaacgataccatctcgggcttgggcataatcggcttcgagatttgaaaaaacagtgacttcatcaagaaaagtcggatacatgtcaagcgggaattcaagccccgaacagcatccgccgatcgacgacatgaagatatgttcgaagtccagtgacagcctagtcggggcgatctgcattttttccagtgcgatgtctaatttatcctcgatcgcggtttcttcattttcaggataaatcaggaaggcattgaaatggtgatatacagggaggctttctcccgtttctatgatctcggccatcgtttcggccgatgcaatgtgcgacgcggctgccttgcccaaaaaagctatgtttcgggtaaaggttttcagatgcttccttattgcaacgggatcctcccggcttatgatgttgtttattattttgtagcatgggacactccagcataagggcgataccagagcgttaaaccgttgtgcatagggactgctggttgcattgtttcttactttatcccgaagtgatttgatgtgcggatctgcgagaactgcgatgccggccatcttgtagtttccgaatttttgatcttgaaacgagaggtcgagggcgcatcgtccctgcatggagaagaagtcccggagatattctaaccagtccttgtcgtccatgcgccttggggagaattgagagagcgcagctctgaagcgttttatgacacttactattttgtcgatcgcctcgtccgaatagtcgctttgtatcgaaatgcttttttgtttggttatgaatatgtatgatttgctcgagagccaccgcttcccattgtacatgcggtttacagttttcgagaggtagttgtcgtagtgcggtagatcctgcggtgcataatagataatatcctgttggtggaaagtatatccttcgtcaagatctttgatcgcagcttccagttgcgtatacaaccgcattccgtcccccgagccgtcgtctctgaaatcagcctttgagagtgtgtcgtattcgggcagtgtcagtataaagccgacggttacgctgccatctttagctatgacatagccgtcgccgatcctgtatatgggaatgatgttttccaagttcgtccgtgccatgactcattcttcaaaaaggtcgcgtgtgttgaaatctcgttggggtaaaatcgtagtgatctcttcttcggtgccggtgatctgctggatgatccttttgtcatgctttatatcatcatccgaagaatgcagcgttgagtcgtaatcgaccgggatcatcgccagaattctgtccagtttcgatattatttcgtcttcgaccggggagatttccttgacggccatttcagggatagatttgactggctttttccgatagaaatatactgcaatgtatagcaaagcgaggacgatgattatcagggcgatctcgatcagaaaagagtatttgatatatgtgtccattttattttctgtgcgtagtacgattggagataaggtagtccttcagcatgttgttgctgtctgtgagcagagatttaatcgccgtatgagtagggttcaacggcccgtcaggattgaaaaagagtgcaaaaatgttatttataacatttgtaataggtatctccccgagaatagctatcgctcgtatccggtgcaggtattcttcgcagatcgggtacgctgtccgcgaattcttgtagttctgtcggatgaggatctgcgtcgcgattttttgcagatctaaagcggattcgtagtcattctgattctctctctccggtttgggcattggttctgggatagacgcaggtttaggttcagatgctatttccttccccattgcgctttggtcttctgtggggtcttcgggcacaatcagctccgcagattctgccagaccctgtatactctggtatttgcgcctacttgccatttgtaatcttgattatttctgccgccatttcttgtaaatagggtttggccacggagtaggtgccgaggttaaggttgaccttgagggatgcaggaatgaccgtgttacagtcgttcaggggagagtagggaatccttgcttgtaggaatgggattccgtagtcgttggagaggcgcttctctgtggaatttgttttccggagccgggatacctcgaacttattccaaagaatatatttcgactgaaagtcgatcggaagtccttgcagagtttttagaaaacattctgtgcccagtacatcactcgggttaatcgaggtggggatgaagatgtgttgtactaattgcagaaatgcgccggtaccatcttgtgtcagggttccggggaagtcgataaaaacatagtcatattcctgagactgtatattctccaatgctctggatatttgtgtgtcgtttcccagatcgacgtattgcattttgtaggttttgaatcctgcgtcgatgagcaatgcgtagcggcgctgaaactggccgatctcggtcttttgtccgagatccatcgccaagaactccggagaggtttctttgtatgacagttgctctatatctcgtttccgctttgccgtattggtttgctgggggtcgatatcgacgaccagaacgttaacttgtttgcctgagtgcagtaggtgccacaggattatttcgttgggtaagatgttggtaaggacggattttcccgcaccacccttttgcgtcatgaacgcgcatattttgctgtcggttgccatctctcggggattattttctgagcaaaattatcgtgtcattttttgcgaatgaaattatacatcgtttttgaggcgaattctacatgtgttttcgggatttatttaatggattaattagcttaataattaattagttaaataatgaattcaataattcgtgtattaatgcgcgagatcgttggaaaggcagtattatttggttatcgtagtgaaggacagctacttttgcttttagggtcgaaagaagtggcaagatgtgagtttgtcggacaaactctcacaacaacctgctccgcagcctgttgcatcttgcgtcaatgctccggaagcggtgcatttgacgaaaatttgcccttcggttaatttttgaattaggaatatggatgataaaagaaaccatagaatttactgccgtttgacatctgccgaatatggtcggtttaagacggaggtcagaaagacgtatctgtcggattccgaatatatccgtcgcaagttgcttcatccccaaatgcgtatccgcagcagggaggaaacggatctgttgaatttcgttatcggatcactgtcgcaggtcaataacaatatcaaccagattgcgcgggttatgaatgccttgaagggaagcggggctgttgtgatcggcagcgtcgctcagaggcagctcaaccaagtcgaggccatattgaaggagtggaatacgtttgaaggccgcctccggcaaagtctgaagtcgaaatgattataaagattatacggaagcctccgaaaccgggcaataggggaacccgggcgcggggcttcgcagctctgctccattatcatgatcgacatgaaagcgagctatgccatacggagaatattattggcaatacttcggttgaacttgcccagtactttatggatgtctctacacgaagctcgtcccgggtcaaagatccggtttttcatgccgttgtcagttttgcctacaatgaagtagatcctgcgccggaggtgattgaggcaatggcccgacagtatcttcaaaaaatgggatatgcaaatcaaccctgggtaatttatcgtcacacggataaacagcatattcattatcacattatctccagtcgggttgatgtgcgaagtgggaaagctatttcgagtagttacgagggattacggacgaagaccgtgctggatcagcttgcgccattattcggataccaggtaggcaaaggagcggataaacgtcagcaacaaaatcagggattggtcagcgagatagatcaagtagtccaaaaagtcctgcttgaagatcaaccatacagcatgtatcggttttgccaagcgtgcgaaaaacggggactgaaggtaaagaaattgcctcgaggatatgttatctcgcagggtaactcttatcctgttgccctgtcaaaattacctgtttttgcagagcgcaggttatcgcatattttaagagcagtcaagcaggaacgaatccgtgaaatgcggtatatccggaaatgcctgtacctggttctccggaatatgcctcagattgatatgcagtccgatatggcggctgaattgtttggggacaagctactgaatcagttggcgcaatacaatataaatgttatttataacagaaatagcgccggaatagtcggaatttcttttggccggccggacttgactttcaaggggagcgagctgaagctgtcatgggaaacgatcctacattatgttcggagcaagaggggggtatctgcaaagaagaaacctatccttcaaacaactgtccggccgcaggcagcacacctccagacgctcgtacagggagccgcagttgggaagaaaatagctgaagacgaagaggaaaaaaagcgtcgcggacaagccgagcaggaaatataattcatggtttatgctattatgctgatatatagatatatgccagctctaaaatattatagtatttaatataaataatttatattatttgaataattgaaattatttgaaataatctgtttatatttgctgagaaggcataatcacaaaacacgaaataacaatggaagcatcacagacttttaaagacaagagaagccggctgacaaaagaacaaagagagcgggttactccggaactggtagaggagatcatggaaaagcatgtgtcacctgaacattggccgtcgtttcgaagacggcataaagccgagttccggaaaatcgccgaaggctacgtttctcagtgtatgactttttcagccaaagatacaaagaggccctataaagcacggatcaaagggttgttggtgagtgaggtaaatggtgaggaaaggatctcctttgattttctgtttgcccagcggaaattggtcattccgaatcgtatgcagatcaagaacggtcaggatgcgatcaatatatccgacgagcagattgaaaagttgaaggccggagccttccttgatgagcttttagtttcagagaagggggcaaagtttttcgccgaggtcgataccgaacttaaccgtcttgctattgctgaagcgacgtatgttcgtgccccgaagacgctgcacggttcaattcttaccccggaacagagcaatgccattatgagcggaaagtctatggagtacgaacgtgaaaaccccaacgataaatcgcaggtattcgttctcaaagcccgttacagcccgatttattatacgatcaggtcggagtcggttctcgataaggatgggaagcctcttgttcggagtgtatccgtatctgtggaaccgagtcaaacactccagtcggtagaagagacggttaagatgtctgctcaaaaaacgaaaaaacgggttagtcaacaaagacatatgtgatattgaataatcttggttattatggatgtatatatcagtgggaaaatcagcggaaaaacccagcaagaagcagaggctgattttgggaaatatgcagaaatcatccaggccgccggccatactcccgtgaacccgatgaagaacggcctgcctttcgatgctccctgggaagatcatatggaacgcgaccttgaaatgttacgcgcgagtgatgctatctgtttattgccggattgggtcgagagctacggagcgaagatcgagttgcaccaggcactcgagatcaggatgccggttctcaatgactcgaatcttcgtctgtacctcgaacaagccaatcatcagggagttcaacaggaagattcccgtagtaagattctgcgcaatatagagaggagctaccaaatgcaacaaaggacgataaaagatccatcacagaaacataacctttaaatgagcaattatgaaaattgtccttggagaagcgaaagaagagtatgataccgatgtgcagatggccgttacacgtcagttaattcttcgtgttaatacagaaataaaaccggaggctgcctatgtggtttcggaaataacctattcccgacgtacgggctattcgtatacgctgataaatactcaaacaaaagagaggcgtacgacaaatttaattcgacctcttagtaaacggtttggtgtgggattttataaagatgatgtgcgtatgatgttaatgccggaacccgagttcaaaagattatgtgaaggggcgcaaaacatagtcaagaaagaggaagtgaaaaaggataaaacacggtatcagctctcaaatgattatcaaggcttcagatacgataccaagctcacaactaaagaaattgcaattaagatccgtgcatattgcaaaacccagtatccggattataaattttctgtacgtgtggatcgttctgaaataaatgtcaagattctttcaggcccccaagagatccgggcaggaaagggacttgctaagggaaactggcaaacaatcgggattacggacttttatagggactggttatctgatggagcttataaaatgttatacgatataacgcagtatgctaagtcatacaatcgctctaatactgatattcaaaatgattactttgacgaaaatttttattttcgattggatattggtgcttgggatcggccatatactgtaacgcctgaaataaagccgcagaccgggataacaaagtctggtactttacagaaaattgagtctcggatcgtatctcagcaggaagcgaatcatcgatcaggcccggaaaaaaccatttaaatatacaattatgtatgcacactttgagggcacatcgcaggaacttgccgacctgcaaaacgatgtgagtgctgcgaaaactgcacttgaattacgaactatattaaaaaatgcggaaaaagagtaataatatcggagaatggttcctactaaggtctgttggagacgaatccgtcgatatactctttatcgtgcgcgacaacagcaaaagcctgcctgatgagcttgtttgcgacagcgatcatagcgagttttcccgattttccgttttgcctgagcctcgtataggtctctttgcattgggcattgaacctactggcaggccaagcggcgatatagagaagtcctctagtgtatgcgtctccgtttcggttgatatgccctttgatgtttaccgaagttccggactgttcgtaagtgggacaaattccgagataccgggacacctgcttggcattttggaagtaggtaaagcctccagtagtgatgatgagcgccgtggcaagcgttatgcctatccctttgatggtcgtcagcagcgcgagttgtcggctgaactccacttcgacaagatccgtgagttccgcctggagcctgtcacgcttcttttcaaggaacttgatagtttcgtctacggtatgagttgcacctttgtccgggacaggcagacatgcaagagagccacgaaggttcgacatggcggtaatctgcttagtaagttggcgaatgacggttcttttctgtcggagccgcaggatggcctctccctgtaccttgaaaggacgcgggttcatcttctctccgtacaaggtaatgagtcgtgcatcgctcttatcggtcttgaccgtagagagcaaggctttggcgaagttctttaccttcagcggattctccatgctgacagtaattccggcgacattgagcatatacagcagcaaggcgctgtaattccctgtcgcctccataacacagtggatactgccgtctttggggagagtcccgataaactgtctgataccagcggtcgtgttgttaaaagtacggatctccccgcctttgtcggaggagtaagctaccacgaatgtagccttgctcacgtcgattccaatgtacctcatggccgttcattttttggttttaacgacatcgcttacatcttggtccttcattgcgaatacgggctcagacaccttacgaactatccggattctgatgtaaagagtatggggtcagaacataattcccggtttagaaaaccaatgagagatcggacttattccatactctgatgtcttaactattcaaatttaattaactaattacaaatatacaacatagagaattcaatatccagtacgcaaatgttgccgctcaccggaatccgaccttctcaatgtatgaatacctgatggaaaagtatgaggctctcaataagcagcaaattgccgaggggatagagcctttgaagctatctgctcttgaggcccgttgtcaagaattgaaatcgggatctttatctacatcggaatcattggcattcattgagcgatgtttaaagacgtcggaagtcggacgtcagtccaatcagaataagaataactcaattccagcaaaggggagaacctgcatcgattgagttgctgtctgaacttgggaaaatgttataaataacacggaaagctatggcaacaataaacttcaggatcgaagcccctattacaaaatatgagactcgattatcagtcgttgaaaaccggttggtatcgcttatcaaggatttcattcgggatgctggacagattcaaggcttgtcggtcggcatgagtcatgtcgaatttgcaaatggagcgtattttaccaatgtgtcgattaagaacgagtggtatgaatctgcgcggggattgaaaaaattggcacggaaatatgatccgaattatgataagcgtgcgcatcaggcatttcctgctatgtatgccaccgacttatcttcgttgggtgaagaaattgtgcggcacttccaaaaaagctgtgaccagttgatcgttgagcagtatgcgtatgcacccattatcaagaatgaaataggatcgctgcacacaaagttagaaaaggatgtgtcgatacggaatatcaatgaaggcagctctttattttttgtctgtcgggaaatagacgggaaggagaaagtcgggattgtagatagatacggacgaacccgtatcccactgaaatatgacgatctgaaggaaataataaacggttattacttagctaaagttgctgggaaatttggcgttgttacgctttcaaacaaagttattgtacctctgaaatgttttaagctgcatgtatatccacttcaattttccgggaaattattgcataataactacctgcttgtggcagggaaagagacgagtgatggaattcgttacggagcagtcaacctcaaagaagaggtgaaaataccgtttgagtttgaaagtttagaagtgcagtataacagggatcgacgctttgtcagatatggattcatggttgcgcagaaagatggcaagtatgggatgatagataaggaaggaagtgttataattcctttcgagtatgaccatcttggccaaaaaggatattccagacaatattatgagtttggagacggatatttgggggcggtcaaggataataaatttggggttgtcgatgtaaacaataacgtcgtaatcccattcgatcgttcaaaagacactcttctcgacatggtttatcctgatgtctattttctacgtcgtccgacggataaaactcctgagcagcgaatcgctgatttagctgaacttgagaaaggacttattaaacaggattgggaatgctataagaagggttgcttgtctgggagctatatgcgggaacaattggataaactgagaatactatattgcaatattgacgatcgggatgccggcaaagcaaatgaactatgggataaatactcccgaaatggattattccgtattccagacttatttgaagatagtaatggcaatctatggcgaacacggggctatatgacggagattgctcacttggaaaaaccaagtgccgataatgcggttggagttttcctgtctccccgcaagcgtatgcagcggatagaaaaggaacttcgggatatagagaatcaagaaataatgggggtgcactacggggagtttcctccggaacgggtcgatgctgagataagtgcaaaattgctcgagaacgacagaagaattgaagagctgcacgattcttacagggagatcagagcaaattatcgcaagtacagagcgcgtggctctgagcagcaagaccgaggcggcctatcgaagactttgcaagttgtcgaagggcaaatccatgtcaaacgtagcaaagccgaacatgtccataatgataacgcgaacatattggcaaagtgacgacggagactgaccagtgcagacctgaaaattaaaaatattataaataacacgaatagctatggcaaccgtaaactttatgctaacctctcctatcgccgtggacggtgatatgaatgtgaccgaaacaaaaatggtcatgagagttaacgaactctttcaggagcttcggcagatatccggagtccaagtggccatgagcgacatcggatatgccgatgggacggattattgtgccaccgtatcggtaaaaaatcaatggtatgcgtcggctgtgcaacttcggagagttgcagaacaattcgattcccaatatcgggggcgagagtatgccgatgtggggcatatgaaatattataccgatttggcccacttggagcaagtgaaaatatcagggttttgtaaagatttcaatgagttggtatatatgactactgaaggtcgtgatcgagttgaaaatgcgctcggtgttgagttcgtgcgattgccggtagggacacatatagattactataatcaacataattccctgttccgaatacgagttcagcaatttaacggagagctgaaggctgggtacatagacaaatatggcatgccggtagtgaaagcggtctatgatgagattactgcaccggactataaagggatatgttgtgcgagctttctggggaaaaagggtcttgtcgcaaccggagaccggcaacttataccgtttgtgtataacgaaataaaaggggcgaaccttgacttgttgagaaacccgcagagcctcgataaagaggtagaaaagagtatttcgatattttcagaaaatggacacattcttgcggaaaaagcgactgatgccgggcagcgctggggggttattgaccgagataacaaagttgttattccctttgagtttgaagccttgaccgaggtttatgccgatgatacacgctatgccaaatatggacttctcattgccgaaagagacgggaagttcggtatggtcgataaagatggaagcgtggctgtcccgtttgaatatgattatctcggattacatgatcgtgataatcctcaattggggcgagtcgatgatggctacctgtttgcctacaaagatggaaaagtcggaattattgatgtaaaccatagaattgctgttcctttccgatattctcccgaagaaatatatcagttcgagtatcctcaaattagattttcagtccgtcctgtgagtaaaaatgagatcgaatgccaggctgatctgtctcgattggaagaattatgcaagcgccagaattggacatatgaatggtctgcggttattcaggtgcggcaagatggtgcggacagtatgaataagcttgttcagcattttaagaaaatctctgaatcgagtttgccggaagcgatagctatttgggaaaaacatgctcttggtaggtttccagtcccgtctattgaattgtccgaggaagaacagaaggtatttcgattggacacaccccgggagagtgatatataccttcggcccgaagaaagaacaggagtatacattcccccacaggaacgggtcgactcgcttatcgagaagattcgggatgcggaggcggtacgttccgagatatcacattattcatatcatgatatgtgtgtcgctgctttagagggaggtttttttgaaccggacggaggagagtataatcgaaataaggagcgtcaactggccgagattggacgtgaaatagatgccttgtatgaacagttggatcgtgcggaagcaaatgtccggaagtttgctcctccccttgagaggcggaaagacatattggctccgacgaccactctgtataatattgagcaggggataaaagagaaaatgtcaaaaccccgatcatccccaacctgcgaacagaagatgtaaaagtgtagtctttaaaatactcctgatcccatgaaagttttaatctcgattaaccaaaaagggtcgtgttggaaaatttttgccatccaatcgtgggaaggttcacatggggagacgattacttgaacgatcatagctgtgagcattttatacgagagattgagcaacatattcataatttttttgattgaaaaatttaataaaccatgattgattataaagaagcgaagaaataccttcttccaacattattggattatggcttcaaggagcgtaaagacaaatcgtgtaaatcatgtcttgtcttttcggacggctcggaaacacttctggtatatcgcaaccaggggggagtctacgatcattatgtcaataaaagtacgtcggacgattatggggacgccgttcacttcattatgaagcgggtactcaataaaacgaccaacctgtccgcagaagatttttgcaaagtggaggctgagctgtcacggattgccgggcttggtgtaattaaagatgttataaataacacatctacgatacaggaaaagcaaccgttcgatatttcaaagtatacggtagagcgccttgatctcgcggctgttcccggggcatgccggcggtttttcgagcagcgccacattgatcccgggcaactggctccgttcaagtccgtgataggtatccttgttagcgaccgcgggtttaagcaaccgttgttctattggcaaaatatggacgggaatatagtcggggcgcagtataaatatatcaaggacaatgtgtgtcagaaaaggttcctgaaaaataccgatcgcagtaattctctttggatgactcctatcgagggtagcaaggcgctgttcgttacggaagatccgctcgatgcaatcgcgcatagccaacttttccctggcgcccggtatgcttacttctgtaccggaggaacatcgaccaaagcccagcgggagatgattcatagcttttctcaaaaatttaaattacctatcatcctcggaaacgataatgatttagccggacagttggaaaactttaaacttgcacttcatacggccaatattgagtatgccatcaatagtaaaacgcagcgagttcttcttaccgtcaatggcgcagagagggaatgggggaaggatgaaatagttgctgccctacaagcagtaatgaagcagaggccgaatataatcctgtcaataccatgggcaaaagattggaatgacgatctacggagcagcaagaagtctatctccctgcggattgctgaaaatatggctcgagtgcagatcgagacaaccaaatcagaacagcggggagtgattgccgggaaattgccctaatacttctgctatactgctggagtttcggaactggactaaaaatgttataaataacattttaataatcatatgtttatatagcgttcggttttttgtgcaacagcttttttttatcggagaaaacagttagttttgtcaataatatagattatttaaataatataaataattaaaatgaatggcaacactatctcaaattgaagaagaggataatgaaatatatgcgtatgtcgtacttggtgccatttgcatagggtttctcttgctgctgacacaattgtattatgccaattacgatttggtgcaacgccttcatatcgacattccgtttctggataaacatgttttctcgaaagaggggatgaagttgttgctgggggactcctataaagtcaggaatgttgtgctgtttctttttgcgttctcgttgacgtctccatctaaaggagagaaaccgacgtctctctggcggcagctcgcaggactaggcatttccgttgcagtatttcattgctgtcgttttttcttacttatcccccttaccacagtcggacagtcattgaatattctcgggtcgctcatcagtgccgtgtgcatcctcagttattgtggtcggattacgaggttttacctggcgccggatagttctcttaacgagaacgaacggttggcagacgggtttgagcagactactgaattgatcgaaacccctacttctgtcaattggaagtatgagttctcgtaccagggtaaaatccgcaccggatatatcaacgaacttgcggtgtatagggcgtcatttgttattggaatgccgggcaccggaaaaagtcattcatttctcgatcctgcaatgaagcagctcattgcaaaacatttttcggcagtggtttatgattataaagacccgacattaagcaatgcggtatatcagtattacgtggcgtataaacgggaacacccaaattccccgttgcggttcgggtatctgtcatatgtaaatatcaaccatacctatcggtgcaatccgatgaaagggatctcgacatcggccgaagcggtcaatttcgccattacgattctgactgctctgaataagaactttgtcgaaaaacaaggcgagttttttacggaaagtgcgaaatcctataccgcgatcgtaatatatgcactgggggtattgttcgggggacgttacttgtcattgccccatacgctcactatgctgtctcaggtgccgtctgtcctgttcccggtgctgaagctgatctccgtgctgtatcccgatatgaagaccctgttttcgcctttcaaagaggcatacgacacaaatacgttgccgcaacttcagggacagttggcctcggcccaaatcgggttggggtcaatgtcagacgcatcattggcctatgttatgactgaagatgaggaatctcaggatatcgctgtcgatttggatacgatctcgtcgaaagaatctccaatgttgttatgtctgggctcgaatccacggttaggggcggttctcgggcttgctaacgccgtataccttacacgcattgccaatctgctcaatcgcaagggccgtaatccgacagctttttttgccgatgaagtggtgacaacctatatcaatggtcttgataatttaatcgcaacggcgagatccaataagattgcggtttttctgggctttcaggatttcagtcagatggtacgcgactatgggcagaagattgccgatgcgatcgtcaatacggtcaataatgtttttgtcggagctgtcaaaggtaagactgcaaaggaactggcagaaagttttggtaagaagaccgtaaaaaagatcagtaagtccataactgaagagggaaaggtgacaacttcgattgccgaacacaaagaagaccgcattactcagagcatgattgaggagttgtcgcaaggtgagtttgtcgggcgcgttgcggatgaatatggcaaggagatcaaatgtaaggtttttcatggtaaagtgatcgtcgaaacgcctgagaaagagcagcgccttcgggaagagttggagagccaagcgaaaagtgaatgtgagagtgaaggccggccatatcttcctgatgaaaccccctggatgcctaaagtcaggaattggtcggatgaggagattaagcgccgactgcggttgaatatgattaagataaataacgaggtttcagacgtgctgctgaggctgaatgagattgccgatacatataagattctgactcatttgacaacagggaatgacgaattttgtttgcggcattaccttgctgacccgcaaaatccgcagaaacgaattaacctcttcgtctggctggaggaagcctaccgtattgtgtggcgaatggaggaacttgaactgaaagatgatattctttcttccgaggagaaatttctgcttctattgcgggacgtatatacgacctcatatgaagggcttcagcagattcttaaagcccgggaacaatatcatgcaatggacttgaattctgtaaaactattgattgatgaatatgaagatgaatatggaaccaatctggtcaatccttaaaatgatcggttatttcctcatggagctgttggtatggatcgggacggttctgttgcatgtaactactttcctgctcttgttctttgtgcttaggaaagtaaaaaataaaccaaaaataaaaaaatattattatgagaaaactggaatttgacggcatcatcggtgccatcgacgaaaaaaccaataagctggtgctgcgagttggttcggaaacttacgtgaagactgatgagggaaattttgaaaccaagaccgactggatcaattgctatgtggcgctctccgaaaaggggcgttaccgggtcggtgatcgttacttcttcaggggtaatatgattgttgagccatatgtcagtaagaaagaagaaggtgtggccaaagctcagatcaaagtctttgtatccgagaagccggaacttctttatcgcaagaaagacactgcacctgtacccgctgcaccggctgaactctgcaatgatgttgaagacctgccattttaaatgcgagccttatgaaaagaatagtagcaatatgcttatgcttggtaataagtagcgtttgccgggcgcaagtcggataccagggacagagtgcaatcagttttggtgcgtccaaaaccaactacggagttatggcagacctccggttcgtgaaccaggttacacccagatccgcagtagggggtgaggtagtatataaccgggagcagctctcgacgacggacgatgcagatttcaatgcgcagcaggttcttgttggtgtcgtatatcagtatccgatattgttcggtcgactcgggttcttccccgcggcgtcatgtctgatcgggggagagttcgctgataaaacaacatccaaaggcgatatgctgagttttagcaatgggtttgcgtttggtgtttcggtcaatattcctgtcggagtcgtaatcggtaagcgattcacagtttatgcagatccgcggcttatgtacatccccacgactaactttgagagctgcatcctttcgatcggcgtcggcctgaagtattatttttaggagttgttgatatagtctactcaatggtaaatatagttttttttgtgaaaaataatgcgaaacaaatttgtttcgtaaaaatatatttttacctttgtatcaaagatatatcttatgacactgaaagaagcattctcgctattgataacgcaacctctttggtataaaaacagcgattatatcagacagcaggctgtgcgggacaaacgcctgttcttggccggcaagtctattcccgaagaacgaatgcgagagtatttgcgagctgcaggctgggaacagattcaggaagaacaatgggctgaaaagtgaatataaagagaaatgaaaccgacctttgcgtgtagcgtatatgccaaaacagagaaacagtggcgagctctcgccgaactgcttcataaattgggatacgtatggtgtgtgggcgtatatatggcataccataccggcattcggtatgacaggtcgcagattgtcgttagagggcagactgtatactcaaactgggatgagcctggtataattgaatgtaatggagatacggggttgttcatggcgctggtaacgataaacgcaaacagggagaaatatcgactgttttcaaacgggactcaatattttgtaagtttgaatcgcaaaatgaagttggagtacatggcacgtggctatcgtgaggttacggccgaagaaatccaagaatcccggcaggggatcaagatacgtgacttggaagtgagataaacgggagaggacgttttactattactgaaaaagatggaaaataaggatatagcataccagcttatcgctaacgatgtggtcaaaatgaataacggagataacatggtcgatgcgtctacggcttaccaggccgttgaccgtgcccgagccgatgaacggcatcggttgttggccggctgggagccgacaacgaagccagtgccgacgaccggccttgttgatgtccttttttcagacgggacgatccgggagatcgtgggtgaccatgtacacaactgggtttatccctatatcgagactggatatgctgttgcctggcggctgcggaaagtcgagaccgaacaggtggagaataactgacaatttcttcccttcacgaatcaacaatcggatgataatatgccggagactgaagataaattgagtttgagcctgatggcctacccatttcccgagatcaaacgtgtcgaagaggtattctccacgctgaaggcagatgcggcattgcttgaggaggcgaagcgccgcgggttctacatggggcatacgaaagccaaccagatgttcagccggttgtttggcggcggccgcataatgataaagccggaagccgatacggaatttgtccggcgggtgatcccgtatctgaaggcattactgaacagctatgccttgaaacatgaagagaaagaggcgatatgtgccatgatcttggacgagatcgctgatgacgtactgccagaacctaaaaaataactgtaataaatgccgaagggagaatatacacgcactgaagcggggcgacgagcctatttcgttgttacaggaatagagttgccgaacacgcttacccatgatgaaatcaaagcgtattcgcatgcgcttcctgaagaacagtggaaacgctgccatgaactctatctccagtatatgagcatcggccggcctgagtatatgaagaattatgctgaaaactaaccctaaataatatggacattcaaattatacagaataagatctacgagatccgcggccaacgcgtgatgttggattttgatctggcgaacatgtaccagataccgaccaaagccctcaagcaagccgtaaagcgtaatattgagcgcttcccggatgattttatgtttcaattgacagaaaatgaatggcgtgaactggtcacaaattgtgaccggttgccatcgacgataaaacacagttcagttttgccctcagcatttactcaagaaggtgttgcctcattatctggtgtcctgaagagccctatggcagtgaatgtatatttgtcgattatgagagcttttgtggccatgcggaactatattatgcaatcctcggtgatccaggccgagcttgccgaaatgcgtaaccgtgttcagctcctcgaacgcgactgccgggagaacctggaggccatgaacgacttgagcgaagacgtgcggagagattttgatacagtattcgaggcaatcggggccttgtctgtgaaactaccggaagccaagaagtcgcgtcagccgattggctttgtaaccggcaataaagaagattaattgttgttaaccaaataaaaaacttgcgtaaatccactattatgaaaaagattctgaagctgatgcttaccgcctctgtaatcgcagctatgcaattcatcgctgcttgtggcgatgattctaaggacggcaatttccccccccctcggagacggaggttgcagttcaaataaggcttgctgtagatgatatgacggcaacacgttccatagatgaaaatgcgattgccgatgtgaacatttatttatacagttccaaaaaaaactatcacttttattatgctgaaaatgcaccgtcatttgagttgcaggtgcttccgggagaatacaccctttgtgtgattaccaatatgcacaaagatatgggcttgatgtcgaattcgttgcttatacaacaaaaatactacatcgagaaaatgcagaacgatattccaatgacggcaagtatgaaagtcaggattcttggcgcaatgactctgcctgcaatagaagttactcgaatagctgcaaagattacctacagcattgccgtagatgatgccgttgcatcagcgataaagttacgttcagttcagttttgcaatgctccttcaatgacagttatgttcggcacaggttcttcatctacaaataagacttattattatgacgatgttgttgtagacatctataatgacaaaatatataccggtgattattatatgctggacaactgccaaggcgaggtcaacagtattactgatcctaaagacaaatcacccgaaaatgcccccgaatgcgctacctacatgcgtattttagctgacggggaaaatggtaaaattttagaatacattgtttatttaggtgaaaacagcacctcaaatttcgatgtcaagaaaaatacgaagcacacgatgaaccttgttatcaaaggggaaaatgaaattgataaccgggttacggtttatgaaggaatctactacggttctgctaactgctatttagtcggcccggatcagacctcgtgtgaaattgacatcacgccttatctcacaaacagcaaatacgagcgtactggagtgaaggctcccgacgccccgcaagttgcttcagtcacggcgctttggggggaagaattgatcctaccggaagtctcattagacaccgataataataaagttaccgtatcgagcgtaccgacaggcaatacagtggttgccattaaagataatttaggaacaattctttggtcgtaccacatttggaaacccgaaattgatgctacgaagacattggcatatcccatagcgaatccatctacggggaactatatagaaacccttcatgttatgcctttggcgttgggggctgttaatactgcgactacaacaagttccgacgagcagaaagccaaggcttgcggtttctattaccagtggggacgtaaagatccgttgggacgactggcctcgctgacaacagcttcttatgttagaacctatcctgcgattgattgggaaacggacatagctcaggccggtgggagaacccgtactgaagctattgcttattccatagcacaccccacgactttcttatatggcaataattggcaaaatgattgggtttatgatatgtgggataaaacaaaaacagtttttgatccatgcccggaagggtatcgtgttgctaatggtaattcgggatataatttttgtaaaaggaatgctggaaattttacaactccgaatgtcaaaggcagtttcaatcttggatacgatttttattacaatggacagggattaggaaatactgatttttatcctacttcggggaatcgtaagaccgatggaaccttacagtacacttgtggtattaatcgtaatgatgctggccattattggtgtggcaacgctaatgcaagacatgataaaatatatagatttattttcatggaaaatgatgtggatgtatattatcagaacttgtcatccggaagtgcctcagcaaagccagttcgctgtgtaaaagagtaagcgtagttgtcgagaaaagactgaaaatagggggatggttaatccatcccccatttcaaattctgaccaacccgtagctgtccagcagaccaaaattctggcttaataaaagcaattaagcttaaacgaatcggaacagcaaatctaaaagcacggacagcagcgcaatcagtaattgtaacatcgctacaatatttgcattccttttgcgcaacccctcttttcggtaatgtttcatacgaaaaacttttgaggttctcgttttaaccttccaatgaagaacaactgttctttatggtcttgcgaccaccgcccggttaaaacactggcgctttcaatgcctaaaggcaccacaaagatagcgattttctgtttatgtatgcaaaaactcttatatttgcggtagaaattttagaaagttcttttgcaactaaagataatgagcctcccaaacagactgaaaacaggacgtatcttgggggcatttctcattttatttcaatacgtaagaattttttatttcatgtgattaatcacaaaaaataagtttctacctttgaaatgttatttataacatttatatatgcaatgttcaaagatacaatgaggcaacgatgcccaccccggagaggtggattttttatatccacgcctttcttgtaattagcggtattatacacccgtgcgaaactgtaatggttagcaaaagcctcattggcctatgaacagcggggcaggaagagatcattgtgcatggatgttatgggacttgcttcgcatatcggtcgaatcaaagttcaacaagacatgatcggggcatatccgccgacctcagagttctggcgatatcttcatcttaacgaagaacaggaggtatccgatagtccggaaggcggtgtatccgttctctgtatagaaggtcgagtcgaacaagaaagaccgagataagcagctttatgttgtagctccatagcactcagattttatctttatcatagcaatttcagaacacaaacaggtatgttatttgtttatatataacctgaaaaaaatgaaattgtaatggatgaagtacaataaattcaggaaaaagcgttatctttgcaaaagcaaagtatccgaacatcaaacaaatcgcacaatgaaaccgactgcaaaaaaatctgtcaatatcttggaaaagatgttggaagataaaaaggcgatacagaaatgtattcgtcaggggggcgatttgaagaaactcgcccaaaaacgtcatgtcagatttgttacacccttatgactataaggagcaagacaaattctatgagttcaccacagcaagaggaatcgtatatgtcgcttatttccttgctatggccgaatacggccctgcttttaccaacgtctatacttttaacttcgaacctcgcactaaggtagacgatgctccacacgatgagcgcatcgcagataccatttgctccatcatagaaaggatatttgtcaatgaccgcaatgcggttatcatcgtttgcgacagtacggatcaccacgagcaaggacgtaatcgtctgtttcaacagtggtatgcgcgcttgaacaataaatcgataagtaaagtagacaagcaatatcagtcagaagattacgacatctattcttctttactgatccatcttgacaatcctgatctggaggaaataacctttgcatttaaccagttggcagaaaccggatttatcccggaagaagattaaggagatcgatcacaggactctgggacgaatacaatcgggtcgagcgtgaagctctgtccgcttacgacggttttggagaaggatgttgccgacgtgaagctcccgccggccgcacaagtcgcctttatcgtgacaggcccggaatagtcggtcacggtcatttttagcgtagccagtctatttggggaattaatcacaaaaaataggtttccgcctttgaaatgttatttataacatttatatttgcaatgttcaacgttcacataggcggcagatgtccgccaatagcgggcatttattatgcgcgtaaatttaggtttcgtacccccgtgccgagtggttaatgccccggtaagcctatgtggtgttgaacagcgggtcaggcgaaacctttttattgtttaacggtttaatgttcaaaccacatgcaaaacaaacctatccgtccgggctacgtgcctgtgactatcgaattgccggccgctttggccgagaaattccggcagcagaattacaattggcagcctcttatcgaattaatcggaggcgactgttcttctccttttgctattgccgaaacccttttgacgctttactttgagttaactcgtcttatcgtgcggcaacgcgaggaacttaccggtaacgatttggaactgatcgaacatttgtttacgctcgagcaactctatcgggccttgcatgcgatgtccgttccagttgctacttcccctgatgcgccggttgacgccttggggcaacagtcgtgatgccatggatgatctccagctaatccagaacaagatctacgagatccgcggccagcgggtcatgctggatcgtgatctggcggaaatgtacggggtaacaacaagtgcccttaatcaggctgtaaagcgtaatgctcaacgttttccggaagaatttatgtttcagatgaccgatgttgaagtagaaaattggaaatcacaaattgtgatatccaattctattaccagaggcttacgacataaaccttacgtgtttaccgaacaaggggtggtcatgctttcatcagtactcagaacccctatcgcaatacaggtctgcatttctgttgtgaaagcatttgttgcgatgcgtacttacctcacgactacgtcacccgaaactcttgctgctcgtcttgagtcgatagaccgccgcctgctggaacttgagcagacccgcatcgccggcgaactcggccccgtccgggagcatccccttcccgaacggctgtccgatgaagccatactggtagactattctgagcgggccgttgtcgttttcaccgacaaccgactggatcggaggttgctcaagtggctcggcgcccgttacaacggatggttgatatggaacggcgaacgagttgcgggctgggtctatcccaagtcctgcatagcaaaactcgataagtaccttccggcagatatttcacgggataagtcaaaatttaacaagtaattttgccggacgaggaaaaaaccttatttttattattgttaaccaaaaaacttgcataaatattaattctcacattatgaaatcctttgtaaaatttctgtttatggctgcctctgccatgacggtgatgttgttcccctcttgcgataaggacgacgacggcggttcagccggcgggttcgatgtgcatgtcccgagtttcgtgaaaggcactactccgatccgcgtggatctgggcgtaagctgcgacaaagcccctacggtcactttcgctaccgaaggcgatgcgctgggcgttgtcagccccgttgagaatccggagttcgacacggattacgtctatgccggcgagccgatcgacgcgagcttcgtgaacggccgcgctacggcttcgttctggtatatcccccttacaccgggcaaccatgccgttaccttcacggtcaactatacgcaaaacggtgcggccaagaccggcacgaaccgcaaggtattgaaggtatccgatgcctcgaacggcgggttctatccggaggttgttggtgaagctgcgggttattacttttcttttagaaatgaacttgaaaagtttaaacgaggttgtgatttttacgtggcttttgtttccctcaatggcaaaaccgatcctaagccgtttaatatcctgatttctcaaggaaagaataatgctgttatggcaaaggataccttctattcaattagtggcggcaagtgggatgatggttggcaaaattggattgatggtgatggcatggtaatacgggaaggtgtttccggggagattacactcaaactcatttttagggacaattataatcgctgccgagatgtcgaggttaagactgatgcgaatgaggaggtaatttcatccatagccagtgattattatttgtggcctcgtaataagtaatatattgttcccctgtaatacacaagtccccagaaactttgcagtttctggggactttgctcattgtttaaattgacgagatctgattactaaaggttatttgttatgttgatgagttttatatcagtaactatttgtaaatcattctttggataactatttgacacagatatttgcgagggtaatagtgtcggtttattaaagaaatacttgataaacgtcctgtccatcattttcgccgcaatagcttcgctttcggtaaatggcaacaggagtatcgtgtcgccttcggtgtaaggagcgagcaggggatttttggcatcgagcccggtcatattgctcacgctggtcaatgtgtatgaaataccttgtgcatcggcatatgttgtgtttatgggggcgaactcatgcccggaaatactggggctgttaatcgtccgctcgacgggtgcccactgtccgctgctggtgtcttcggcaccggttatctcatatgcccgaaaggtggggtatagctgaatcttgaggagctgtgcggactcgatgggtgcagggtagtcgagcgccggagtaaatgctacccgtgcaatcacagtcttatacccgaaccagtatacatatgtcgaagtgtatgccggcttataggacgtttgccgtgtattcgagtcgtaggatatactgatcttaggcgttagcttcgttgccacgatgttgtttgttacggtttttgaaccgatctttattcccgtcgaagtggtaacgtcgagggtatacgatatgtttccgaccgccgtggggacgaatacgatcgggtcgagtgtgaagctctgtccgctgaccacggtcttcgagaacgaagtcgtcgatgtgaacaaccctccggccgcacaagtcgcctttatcgtgacgggcccggaatagtcggttacggtcattgttacggtgttcttattgtacatgtaggtcgagttcttgttctgctggttgcaggagatctcgacctttggctgtttctccagtgcgaacttagcgtatatggaactcttggcctttgtcggggcatacatgtacgaagccgaggcggacagcagttgcgtataagcctgatctgcataccatccgtcgaaagcgtatccgttgccgtccacggctgtgaacgtgcagccgtcttcgtagcagtatgcaagcacgtagttcgtccccgcggccttggccagttcgccgcttacggtcaccgagcctgtcccggtggtaaaatatgcctgtaccatgttcgcgaattcacaggcgaagttgaatttcgtactttcgcctgcattgtcgtttacgacgacctggtactgcacctgcgagtttacgccctttttgaccaacgagggagcatatctcaggtcgtaacgctggccgcctctttggggtatatataactccacgtcggggccgaagttccagccgccatccccggctgcgaatttctcgccgtcgcctttcatcaccttcagcgttcctgtgaacgtatagtcgctcttgttcgtcacgtagatgtcgagtcctccgtaatcgttgtccgggacgttgtattttctgggccaccagtccgtgatgtcgagcgtataactggagatgcgggtgtcggtctcgttgtcaccggagagggtgatgttgtaggtgtgtgcttcgttgggccaaacgttgaaatctgaggtgttgtttgccccgaggtagactatataatccacgattttattttccccgctgcgtccgcgtatgcggaagaaggatgcgttttccggcgcgttttctgcgtttttctgtttctggtctttaatcgtactattctccccacgtcggttggaaagcatgtagaataagccggacgcactctttgccccttcgggcagcgtgcggacttcgctgtcataaaaaccgtaggatggatcagtcaagtccatctgttcctcgcagatgagataatccttattgggcatgctgcacaactgcacagagaggatctctatctctttgtcgggtgcaacagttatgttgtatgcgatcttcgcggcgttacgcttgacgcttacctgaattacttttgttgtcaggtcgagcttttggtatgcgtagccatacatggtgagtgttccttcctggggtgcgtctgtcctgtaatttatgagggcgctataagggagttcgccgagatccttgtgctgattgaccgcagcgtgaatgctgtaagtgccgggagctatatctatttggtgagaagcaccggtagcgtaaaaatgatatgactgtccgttcccgtagagatataggttcacgtcctggattgtgttctcatctgttgcccgggcctttgccgccggctgttcgggctgtaactccaatgtaactacaacagttctcccgtcgggacatatctcgcccacgaactgctggcatcccgagagtaggattaacgataaaaagctgtttaagagatatttcataagtgtaaagttaaaatgtaaatcgacggcgggcctttcacccgcattgcgtatccgttccgcacaatcccatagtcacgtccctgtcatggactgaatgcgccgttctgttttttgaactacgccgatctgtggttatctggtcattgttatgtctgagggcaggtagtatttcgtcgtttgcgactcgacggatctgtcgttgtaattgaacttgaagcccgggttgtcggccgggcgtatcgagacggagaatttttcgtcgcagcgccagaggaatgtcgatttcgtcgcccctttgggtatcgtcggcatcccggcggacttccggcctacgggcgggatcttcgatgtgtcgagcctgtactcctcgtagtagaacttcaccggctcggaagccttgtagtcggccgaatactgcgtgcggtaatcgtaggctaccttcggtacgggacgtccgccttccatgacgagatactgaaattctatccgggcgattccctgccgggttatgtttactgtccggggcttgagtctgacttcaagttgcgtgatgcagtcgcgcgcgagtgtgagcgcataggtcgcctcgtcggataggagctgtccggatgtgtcgtaccagccctcgacctcgaagttgaacaattcgtcgttcaccagcttgagcgttaccgtctcgccttcgatgttgtgctccccggccccgtcgatggtgaagcagccctcgacgacgcttgtcacgacgatgtttttcacgacgtccatgtatgcgcgtgcttttgccgacgccttccctgccgcgatctcgaattcgagaatctgctcgccgatctcttcgggtgcatactcgaacgtcacgtcggcatctacgggacaagcctggccgttcacggcgtttccgttcaggaatatcttgcctttgcccagactgacggccggtgtcacgatgaatttcccatctgcgcccggaacaccttgaatgtgtagctgcaccggaatccgggcatcggccgcggggtttacgatcttcgcttcgcagacagcttcggccgtgatttctgatggcgctgttaccgtgaccttcaggtcttgctgttcactgacttcgccatcaggtgacttggcctgaaaacttacgagcagatctcccgcttgggctggggtaattacaaggcgtgcattcttggccgagagctgcacccattggcccgatgtgtccatgtcgctcccgtcgagtgtgagcgtggccttcccttcgcggatgaacgctgagagggagaagttgccgtctacgccttcctgagagacggccagcgtaagacttacggcctgtcccagttcacagaccgttgcgacggtagacagggatagttgcggcttcggctcgacgatctggtatttcgacgaggagcatccggccgatacgaacagcgccaatgcgtaaaatagggtcgttctcatggtgtcgtcagtttgttacgatgatctcaagagtcttgaattgggtggtatatccgtccgttgccgagaactggagacggtgcatgccccgctcggcggcagtgtagtagagcggctgttcgctgttggccggcacggagaacgcttcggccggggtgacggctacggccccgtactggagcgtgccgctgcctgtcagttgcgtgtaggttacggggatcgcccctgtccatccggattttgtgaggagcatcgtcatttcgatccgctcggtgatggatgccgtttcggggtattcgacctccagtgcgagtgcgggactcttctgaacgttgaagttgacgaagctgcggccggactgctcgccctctttggttttgacctcgaaggatatgcgcagcggcccggccagcgtcggcgtgagcgtcaggatctccgtagtgttggacatcgacgtccatgtgccgtcggtcgggaggttgctgccctgcatcgagagctcgcaggccccttcgctgagtacggccgagagctgaaattccccgtcgtacccctgctgcgagaccttgagctggagatacgccggctggttgatgatgtagacgtcctgcaaggccgtcacttcgagcgtcggccgaggctcggtgatccgatattcggattttccgcaaccgaaggctgccatggcccagaggtataggagtgtcgttctgaaaagtttcatagggtagtcgtttgaattatcacagctcttccgtctacaagtcgcggacgggatatgtccggttgtcgggttcgtagaggaaaaaatatattcgttcgaattgtgtgagactgattgcccaaaggtgcaatccatctgcggcagtggaggatatgtaatgctcgttggcttttagttttctgccacctatcaagctcagacatcgttgtacttcgtccagattttgacgtatcaaatacatttgtcccgcagctggctggtaccatttgcccggattatctttatcgtagttgtaacatttttcggtgaactcgattttccgcataacgtctttggcattgagtaatgcctctgtgttttttcggccgttataatcaaatttggcttctctccagtcctgaatgaccgtgaggtcagaaacactcgtgaactcaccaccgccccaatctccgataacgggatccggggccatcagaaacctgcattcctccgtgatgattgcgacaccttcagcttgctcttcccattctttgttccataccgtacttgggtagtagagtgaattgcagtaaatatatacgccgggctcgggattcgtgaggcttccgttaatccccttgacttcgacttcgatgtccacttcggaaacactgatgtcgtcctttactacgcaatggattttgtgtatacccgttacatggggttggtaagagagcatattatgggagtctgcaggacagtagaaacgatttccggcaatgccgttttcgagtatgaaaaatccgttgccttcagttgacagttgtacgaaaaagtcaccggcataattctctttggttgctgttaaaataaatttaaactgctgttccaaattgattgtcggggtgatacattcgacattcgttatgatttccgcagtattgacactcactgcataaattcttttttcgacctttgtcccgtcggccgagattgcatagataccgaagttgaacggctgtttggccgtcgccccggcttggggcgtaattttcaggtggagcaccttcgaggagaactcctcgttgacgatctcgtagggaatctgctgttcggcttgccattgcagttcatggccgtctactgttgccacggccttacctccgttgcaggaggtgttcaacaggaaatagtctgctgccggattcttttcggtgattgtcagtgttgcctcgattacttcgcctaactcgtattctcggctctggtaatcgagtgtcatgctgattgagggtttcgggccgggagtatccggctctgcggagtctttgctgcacgccgtcgttgcggccagtagcagcatgagaattgtcttgtaagttttcatgacgcaaaatatttggagttgtgtcgccgacgggactcgaacccgcaacctcatgcccggatccaatttactaatctattcgtatgaaagaaaccggacatgcgctcttccgattgagctacggcgacttgaatcacccccggccgcagccggggatgattggggaaaaggtagggtttactgccccaagttcacgtcttgcgtggacaaggcatcccagtttgcgacggtcacggccaaagtcacgtcctgtcctgtgagtccgtcgagcttcgcattgactttgtaggagccgtttcgtgcgatcttgccgccggttgctcccgtgagttccgtttcgtaggtgacggccagctggtcggtcgtagtcgagaggttgccgtcagcatcataaacggcattgaggactacttttattcgcgatcccgtagcggctgcggccttctcgttgatgtagaaaaggttgttgtacttgtaggcgtttgttttcgacgctccggtcttgtcgcagtaggcgtcctgtgccgaggtgaaggaagaacttacggttgcatatttgttcgccgtctggtcaatcagataagatttctcggctcctttgctcaatgtaattttcttgatctcgatacaaccgttgccatatttgctccggaacgcatccgtcatggtggtctgaatctcgaccttcgccacgacgcgcttcacggtcatggttacggacgttgtccctgctgtgattttggcggttgtagctccggtcattacgaatcctccggagcgcatggcctttgtcgtgacgtttgcgtaggtgccgttgtaggaggcgatgtcgctctccaactcttcgagcagcttggtcttggtggtgatgttatccgctatgttacggttgataacgacatagaaatcacacgaggcatcggcgctcacgcccggaagtacgaacttgatcggcgtcgtggtcgagccgttcacttcggcggcggtcagtacgcggcgcaggatttgcgtgcccgaggtgttgtagacgataagtacagcggaggagatcgacttctcccaactttcggtagtgccggagccaaaggcgcgagttccgtcagctacactttcatttttcaggataagttcgatttcgccttcctttccaccgttggtcggtgtaggattaacttcgtctttcgtgcaggctgcaagcagcatcggcattaccgcgattgcggtcagtttcataaaaaattttttcataaagggatgattaaaaaattaagtgagaaaataagttattttcgagcctatgctccgaaatgttcttcttgaatgacaattccttcccagtcggagataattaccatcacattggctccgttcaggagaatgcggatgtctatctcgacgtcgtgtcccggattaggggcgatctctatgtagcgttgtatcgtggccacaaagagttcatgcccgtaaatcgaggtgggatcgtcggtgtagatgccgattgagattggcgagtccgaaggaaagtagggcgtgtaaaacgatcccgacatggtgccggccgccgggtcgcgggccagttggggacgatacattctgaagccgccgcagggcttgttgtcaaaactcagagcggcgtagttgttcagcccgaaatagaaatcttcggggttgttgatgttctgcatcccttcgacacggacgttgaccttgtaaacggacttgaacaggtcgatgtcgaagcgcagcgagtcgcccttttggatcggcgtctggatgcggttgaagaaaagcgggtcggcacccgtatctgggaaggtgattgcagcgtcccggatgttgtctgccgacaccgtggagccatgccctacattcgcaagcgtcacaatcccatattctccattggaaatgtaggtctgcatggctccggtatcggtcaggaattcgtcccgcgtaagcgtcgtgtcgcggtactgcctgccggtcttcaggtcgaagaagaacaggcgcagggtctgcacctcgtccatggtgtcgtgctccccgtcgttgtagttgtagcgcaggtatacgatggccttgcgcttcacatcgacgtcgatgtcgtcgtggatctcgcagccggggagaaggctcgcgagccaaatccccgtgagtatgtagcagaggtatttcatattattcgttgtgtttcttgagttcgtcgaatagcgtcttgagcttcgcgttggatgccaaatacaggaagagcatatttcggggtttacagatcatggccaagtgttcctttgcctcgtcgatccgcccggccttgtagtataccaaggcggccagtgcgtgcgtctcttttgtgaaatgccaccaatgcagataatccatgatgtctgctgcgtccttgatctttccctgctcccaaaggtcgagtaccatagcctcgtagctttttcgacgaaaggagaccgagtgcggtagcatgtagcataatatggtgccgacacaaagcagaagtgcatagagtactatatcgaataatcctaactcaactgtcataggtcgtagattttacgttgttctgcttatagagtatctggatttcggggtcgaggttgccgcggaacttcagcaccgggtctgcctgaatcgccttgaggtaatattccagtccttcacgcggccggttcatgcgcgagagggctatggccgataggtaatcggttcttgggttcttctcggccggcggcagctgctccagaatctcgaaagccgcctcgtcgtaactcagcgagagcagcacgatcgcaaggttctggcacttgtagtcgttcagggtgcgcagcgccccgacataatcccggtcgcggagctgctgcactccgcgcatgtaggtcgtgtcgagtacggtcagcacgacggtatccttgaccatatcgacgcggcgcaggttgtagcggaagtccacggcccgcaactggggatagaggatctccttcatgaaggcgtagtccccggggaactgctggcggatctgctgttccgtcacgtcgaggttcctgctccggtcgatcatgtccgtaatcttttcccagttgggcacgtcgctgttgtggcggatcaggtgcttgagcagcgtccagtcctcaccgatggagcgggttcggatcagcgtatcgacctcgtggccgaactttcgcaccaagcgctccttgattgcccgggcacgctcgccggcaatacggttgttggtcgccatcgaaccgtcgggagaggatgaagcggtaatggtgatagaatcgacgaagaattcgtactggttgataagcgtgtccatcagacgttcgattttgtcaagctgcacatggttctggcccatcgtgtcgattacattggcacggccgaccgggaaggtgatgtagttacggtcgcgtacctcgacatacttgtctatgattttgagcatgtaccgaggctcgttatccaaaagcgacaacatggatgtcacggtgtaggtcagcgtatcgctgttcgtgaggtcgtaacggctgcggtcgatggcatcgacgcggccccggaaaaagagatgcaggcgcttggtatccttcgtcggccgataggtctgggtgtaatagtagcgtatctcgcctttgcggatcagtacggagtcgagcctcggatcgttcaggtaggggaacgagatcgtttgtttgtaggtggactccagtttgtcggcccggcgcttttggccgccggcgatgtagcggttgtaggcttcgtagtacttcgcggccagaccggtagtggtcgtaagctctgttgagtcgccgagaatacggttcaggtacttgttcatctgccagtactggcgcttctggatgtcggaaaaaagctcaccccggatagagagaggttgcagcgcctcttcagtcccgttgttctctatgaccggggtgagcgacaacccccacgtgctgctctggagagcagcgggtatgcctatgatgaagtcgatagcaatctccccgttgcgttcggctacggttttcgacttggcgacgatgtagacggtttgaatgtcctcgcccttgatggtgacttcgcccgtggagtcgcgttcgacctcggccagataggcgctgtcgcggccaccgttcatcgagatgcggcgcatcttggccacggcacgttctacgtcttcgacttcgggcgtttcgacaggcccgttgccgggcaggtggatgtcggccgtcggggtgctgcgcagcaaggagtgcgtcatggcgcaggagagcatcaggacagtcagggctatggaaacgagtgttttatatgggttcatttcttagttgatttgatgtccgataatccttcggcgatatattcgtttgcctttgccagatgcgagttctcccgcggacattgaagttcctgcttctccggtgccgtggcatgccactcttcatagcagtcgggacaatacatgagattgacggctcccacatagaacccgcttgaactgatcttccgaccgcagcggtcgcagactttggcccgaacccatactttgatttcggcggccgataatgtcagtactttatatcctttggagttttcgaaagtcgttgtcatgggatctgtgaattagaacaagtaggaaaatgacaggttgcatttgatcgggacgagcaggaaccggcggtgacgataggtatactcgtcgtcgaactccccgatgtacttcggccgcagcttctcggtgtagggggtatagacgataccggccccgatctcgacgatgaagttccagcgggtactcaggagtttcgaatagccccacgagcatccgatgccgtaggcgttgcctttgaaggtgcgtttgtcgtagcctatggtgtagttggcataaaacagcgagggggagacgaactgtccgatgtatcgctcgacgaaccagtgccgccatcccggttgcaggacgacatggctccactgggtgtctccgaacttgaacggattggctgacaccggaatgttgatcgtattgtgcaagttcacgttcagatcgacggccgcgtttatgttcccggcagcccatccgacgatgttggtcgatacggacgagaactgggcgtaagaggctgaaaacgtgaacagcgatacgataatgaggagatagtgtttcatattgacgatattgtgaaaaaagtggggcggacgcatttgcataatgtattaaatcccttcagtctgcttggaaagagaaattgtccgccccagtagtttcattccggagtgttgtgtcatttgcagaccgatgcttttatacatgattagattttaatacgttatgcgatgcaaaggtacccgttctgtgaggtgcaaagcaaattatagatacttttgggaggggcttccatttttgtaatcgtttgattctaaaaaagaatgattatatttgtgcaattgaattctacaagaaaaacatggcgaaaaacggggatacgagaaagctcctgctggatattgatatcgaaacgatggagtatattaatgactacaagtatgcaatgcttttatcccaggggatagtaatgaccaatgtggatatatttattgcagcgatccagagtttaaagcgtgagacagagaaggaaggaacactcaaagttgttccccggccggagcatgtgcgtaaaatggaagtcagcagacgcgaagcattgcaggccggcaagttacggaagaaacaaaataaggagtaatacaaggagggcttgatttaaggccctcttgtgttgataaagagatagcaatagggaaggggcgggagagtttgtccgttcctttggacggtataatgtaaatgctttcccgtactgcggcctgaggttcccattatgccaatcggatcgccgatatgtattttttggcgcggactccggataaaagtgcgtttcaggtgcccgtatgtggttttaaagccgtatttgtgccgtatctttatgtgtaatccaataagatcattataggctactgtatcaataatcccgtttgccgcagcgtagattgtatcattcccagacgggggaatgtcgatgcctgagtgctggtgtattttttgtgtgatagggtgaatgcgcaagccgtagcctgaagagattcgcaccctgtcgaaattcggttgttgtactggggagatacatgggatgtcgaggatctgcggtgctctagctgggagttgggcaatgatatctaatatttcattgtttctcgctgtatagagtgcatgtgtatcttgtccccataaagttatgggaagcagttggaggagcagcgatatttttgtccattttctcataaaagatcagaaagaagaacatgcagagcattcgttatcgcctcgttccgggggcagtcggccttgatgctcctgcaaaactcctgtatggcttcctcgtttttgcgctcgaggtaatcccggtattctcgatctgacatagactggtgaaactggggcttaaaatccgcgatgtagttgacgaggtagggcttgaaaaaggctaaatcgtataattctcgtatttccagatcaataatctgctggagttttttatctgtattttcactcattggtttttgattttttcaactgtcgattttgaaaaaaatacataattcttgattgattgacgcttcagtatactgcgttcgactttctctatcgccctgtattttgcattttttttgttgtctgcccgaactctgcaatgcacgatcataaaacgtaacccgacatcatataggcccgggggaactttgttggcagttttgtaaatacctaataggttcgccattcgatgtatggctttggaactccgtttgaatttcacctccagctctttagccgtatactttggatagagtttaatcaattcctttttttcttttgaattccactccatagtcttgacaattagtgtttaataggaacattgagttctatctcacggacacaggcttccatgtcgtcgcccatagcttcagcctgggccattccttcgagccggagtctgtccgagtcgttgtctgcgagggcatataagcgtccgtattcgccatatgcgtcctcgatagtgatggcatacactttcatattcggtatattgttattggtttggggaaagaatatcttgtagttcccactctcctttcatgtattgcatggtggttatggcggctcgtcatttcagcatcgggtatcatggtgccggtcgttataaattttctttttccttgaggagcaacagccccttgtagatcgtttcccggagattgtcttgtatccccggtaactttcggtgcgcctcgatgatcgaccatatttcttccgtgaagtcgatgcttctcttctgcacgaatgtatatgtccggctacgcttctttttctggcgctgcgtaataccggccaacgcgatgctcatcatgtcctcgtcgtaggaggggcggtcttctatggctggcatatggagtgtctactgaaggagtttagcaatgatttcatctgtcaaagcactcatgtcgtcagcgcctttcgatttcggtgcgaattcaaaaatcgttttatgttcggcttctgcctgtttgaaggcttcgcataggcggatattcgtgttgaacgcatcagggagaagatcatccgcccgtaatagttcgaccgtttgttggtaaacctttgtccgggcgttaatcatgcttaatatgatgcctccgagctggatttgggctccataattcttttttatcgtgtttgtggcagagaggatacgtcgcatgccgtcgtaggagaattctccgggcgacagggaaataagcatggcatcgccggcggtgattgcgtttatgatgattgcatcgagagctggggcgcagtcgatgatggcaatatcataatccttgtattcgggcattgccaagtactttttcaggaaaaacggggcgttcacgtcgtttgcgagctgaacgttgatattcgatgtcctgacatccgaagggatgatgtaaaggttcggattgatctcgtacggttttacggcctcgcctgttataaagagcttgaataaagtctccttgtgtttcgtagcattgaagattagcgagaggttcgcttgttcgtccccgtcgatcaggagaactttctttccgagttgggataggcggaagccgacatttgctgcggtggtcgttttcccgacaccgcccttttggttgatggagattaaaactttcatggtagcagactgtatttggtattataaattgagttccatttgaatcactccctgttcgtgagaaatcttctcttcctttatcgcgttttcgatggatttgaggtaatatgcatcgcgattattgatcttgtcgccgtgatcttccatgtaaatccatgctgcgagatgtctttgaaacacgtatgtgtaatttcttagggttatatttttgaatacccgattgtatctgtcttgcccgatttttaaaatatgcccagcacaatgccgcatctgggaaagatggttctcgtaagcgtcgagatcttttttcgacggatgtgtctcgtatatgttaaaaataatatggcttggcgtggaatggcgattgctcgggaactcctcggtataggtgaaataatagtttgtcgtattattttgcaccataaggagcagctcgtcgcgtgcgacgtcgaggacgcgccgacggaactcatggtatctcgggactgagttggcgcggacacgctgcttggattctgtactccctttcttcttgggtgagtcgacattcagaagcaatcgtagatccggatagggaatagcccatttcttcccatctgcgtgccggcatatctgcatgtagatcctcgcagtataaaccgaatggcagttgtcgacggtagcttgcaataagcgtgagtatccgtaacagggatttaccagcaatctggctatatcttcgtcgaaaaaaatatggatgtagcttctgtttttctgggacttgtcattgttgtaaaatactccctggcataaaggccggcggccgtcagtcagggtttctttggccaattccgaccatgtggggaattttaccggtatcctgatcagatcgctgatggcagctctgatccggctgtaatggctccggatattcgtaaaagcatctaaaggtatcctaacctcgagtgtccgctcgttgatcttccagtaaacgttttcggcgtgcagtcggaggttccgctcttcccccagaaggtaatcaattttttgatgttcccctttgtttccgaagcgtcggcacagcgtgacgtattcgtctatattttggttgatgatcggctgtaaaatgttggtgatttttacgattgccgatagttgtatcagccggtaattgtatttggcatccaaaatcatgtttggctggtttaattcgagtggtgcttcgccagtcgggagggttgggggaacgatcaagctctcgcttttgtatactcgagagtctttgttgctatatatcgtttgtactgccatgatcgtggataaacaagagagaggggatatggtgtgccaactgctaccgtgggatcagtgatgcagtcttatcaccactcccctcaagtctcctgtgctttatattgataattttaattctttatatttccgcttgagctgtttgaagtcgagcaataaggcatctgttgtaagtatgaggatttttcgtgaggtgctatccggatgagtcggaatgaatcctgcatgaacatactcacggacagtctcgacacacacgttgtgcatccgtgcgcaggcgtcaacggttatggcagtgccatagaatttttgagggtcgaaacattcctgtttcatcctcgcgacggtggcttccagatttctcactgtgaattcgagttgttggacgtagagactgatcttggtggaatcaatatgtgtagagtcttccatgactgattacgatttatgatattctcgtgattgtaaatgtattgtcgtctgaatatgttttggtttcaaactttcgtggctcgagttttcctgtttttatcttcttgttataccgctttattgcctgtcggccatttatgactacattccctacatttttgaaaatggcaggatttcctaccttcattccctttaagaatacttcccaccctttggaggaaggtacttctgtaaaagtgatttttcgaggcatgtctttggttttcaaatgttatttcttatctttacctaatttattggggtgtgtgagtttggtacgcatgtcccacaacgcaaatatacaacaaatgttataataaacaatagaattgttataaattttatttgatttgttatggatataacggagcgattgaaggaaattattgattacctcggacttacgccgaatgcctttgctgcgaagattgggatttcgcagccacggatgcgtaattatctgactggacgcactcctgattttgaaacattaagacgaatttgtataacatttgtaaatattgagccgcgttggttattgactggggttggagacatgttggttccatcgatagcgctcggtgcgactaacccttcttctgcttctacgttagaattagcgattataaaaacacaggctgaaacaattttaaaacagcagcaattcataaacgatcatttcatggaactacaccagaaaaaaatatcccccccccgcgttggcgtggaatatcctgataaagagcatattaaagagtagttctgtgtttgatatattgtagtgggatccaattttcaaacacggactccataatagtatatcgaacaaaatgataaaattctatttagctactccccagcgggagagatcggcgattatcttatccgtaacatttaagggcaaacagtatcgacgcacgacaaaagagtcgactttggtaaagttctggaacccccagcgacagagggttcgggtgtgtcgtgaaaacagattggcgaattgcacgaatgatgcgttggagctgtggtgccaagctgcccaacgagctgaagtgtactttaagaaaggttatacgattccatcttcgcgagactttttcgaggtcgtggatgaagagtattacaaagccttagagcgacctgttccgtcaataaatactccggagtctccctctgactattactctgattattttgagcgttatattgcccgctatgccgatgcgaggtcgataataacgatccggcattaccgaacagtcctgaataagctgaagcagtatgaaaagatgattcggtgtcgtttgcaatttgaagatatcaatatcaatttctataatcagttccggagctggatatatgggcagggatattcggataattatttcggcagtcttatcaaagtgatcaaacaggtttatagggaggcccgggaggtggatcacctgcataatttgaatggcacagctcataaaaattttatcacggtagcaaaagagagtgatcctgtctatctttcggttgacgaactgatgaagttgtatagattgagaatcacaaaaaacacagtattgaatgagtggccggatctgtgcggagagaaagcagtcaggcagcgcatagctacatgtgaactggtacggaaccggtttcttatcggggcattttcgggcatgagggtgtctgactttagtcgtttcagcgagtcaaatattgttgatgggatgattatgatgcgtacccgtaagacagataccccgattgcgattccacttcatcctgtgatacaaagaatccttgagagcgattttgacctgtcaaaaacgatttctgaccagaaaatgaatgtctatatcaaagtggtggcgaaaatggcagggatcgacgaaaaagtgacaatttgcgaacatcgagggggtgagttaaaagagattagggtcgaaaaatatactttgatctctacgcatactgctcgccgatctttcgccacgcacctccagcgttccaaagttccgcttactgcgatttccaaggctttggggcataaaaaggttactacgacaatgcgttacctgcgattgggggtggatgagaatgctgctatacttgcgggaagttccttttttaaggattttgaaggagaagagtaattcaatttatcctaaattttatcctgcacaaaaaaaaggacgctgattatcagcgtcctttggtgcccaggacagggattgatttatgaaaacatatacaaacaactgaaattcgaatatatttataatatgttgaaatatagtatattaaaatgatatactatgaaatgtattttgtctgtttttagctgttttgcaaaaatgcggacacggtgcggacgcaaaagtattgctgtattcgaatctaaatcatatctttgtagagcataaaatgaggatgtatggcaaaagttacatatgttttggcgcaaggggagaacagcgcgggagaatcgcaagttaatttccgtgtctatgtttcccgcgaattgcgtgtacgtgtgccgtccggcatttgggtcgatcggaaacgttggggaaagaaaaacgatatcaatattccgaacataccgggggaggagcgcgatgcgctgttggcaaagcgggcgaaattgaaagaattggtcgatgtaattgagacctcggtcgaggcggcagacgataaatcgaccgttacgcgcgagtggctcgaaaagttgatccggcgcactttgcggccaaagacggcgacttccgttgaggaaaagaaaataggctttttcccgttgacggatgaatacctcgctacgcataaattgtccgaatcgcgtgtcaagcatttcaatgtcttggtgcggacgttgaagcggtatgagttgtatcgtaaactgtcgaaccgacggttcgtgctggacgtacacaccgtatctccgacgacacttgatgatttcggggcatttctgatgaaagaaccggagattttcgacgaacatccggagttgtacgacgaggtgccgtatgcccggccgaaggtgaggaagaatctgcctgtgaagcgcggcccgtacctcaacgctgcgggagaaacggtaattcccggccgtccgaaagagcggggcatgaattatgtttcggacatgttgattcgtctgcggtcgttctatgtatggctcaatgataatggacatacttccaatgatccgttcaagcagtataagatcacggagattgtctacggtacgcctatctatattacgaccgacgaacgcaaacagttggccgaagcggatatgggggatgacaagcagctggaaacgcaaagagatatttttgtttttcagtgcatgatcggctgtcgggtgagcgacctttataagatgacctatgccaatatcatcggcgattgcatcgaatacgttccccgcaagacgcgcgacgatcgggtggtgacggtctcggtgccgctgatcggtgctgcgaaagaactgattcgcaaatacctcgacgagaaccgtggaacgctgttcccgtttatttcggagcagaaatacaatgtttatatcaaagcggcgttccgtaaggcgggactgacgcgcatggtgacgacgattgaccagcggacgcggcagaatgttcaggtgccgatctgcgaccttgcttcgtcgcacatggcgcgccggacattcatcgggaatgtttataaaagcgtgaaagaccctgcgatcgtgggagcgatgtccgggcataaggacggcagccgggcgttcgcccgctatcgcgatatcgacatggatataaaacgggatgccgtgagcgtgttggagtagaatttgttttgtcgataaatttgtataaattagcgacaataaataaacaaataagcaaatgcaagcaatagaggacaagatacttaataagatgaaaaagtgcgggcggggtaagctgtattccgcatccgatttcgctgtgtacggatcggccgtatcggttgcgaaggcattggaacggcttacccgaaaaggcggtttggtccgtattgcaaggggcctctattgctatcccaaaatcgacagaaagttcggactgggcatacaatatccgaccatcaatgaaatcgctgaaaaagtagcccggcagagcgaagcccgagttgttccgacgggtatgcacgcattgaatgtattgggattgtctgcccaggtaccgatgaactatgtgttttatacggacggcaattcccggacggtcaatctgttcaacggtcgcaaattgcgattcaagcgtgtagcgcttaaaaatctggcctatcagaataaaacgctgatgcttgccgtgttcgctctgaaggagatcggtcggccgcaggtgacggaggagcacaccgcccaactgaagacgatattcgcccggattccgaagtcgagcattctgcccgatctgcggttggtgccggcctggattcgtaaaatcattatgtcgttctatgaagaataatttttggacgttttccgacgagcagaaaagtatgttcgttgcacagacgagcgagcgtgtcgggcttcctccgcaggctgtcgagaaggactggtgggtgacgatgacgctgaaagccctgttcgaatcgtcgtgccgggacttcatcaccttcaagggcggtacgtcgttgagcaagggttggcatgtcatagaacgcttctcggaggacatcgatattgcaatcgacaagtccttttggggaattgccggggacaacaagtcgcagcgcgatcggattcggaaactttcgcgggcctatatcgagcagcggctcgttgcggaaatgcaggcattgctggaaggatatggggcttccgattttgagttgcgtgccgttccggcgcaggactccgatgccgatccgacgctggtgctgctgccgtatcgaagtatttatgcgaatatcgagtatgtggaatcgcaaatccggatcgaattcagctgccggtcgatgaaagaaccgcgtgagcggatcgagattcgtccgctgattgccgaggcatatcccgatgtattcggagaattggtgttcccgatttatgcggtcgtgccgacacggacgtttttggagaaagcgtttttgctgcatgaagagtttcagaaagagaatccgcgcttcgagcgaatgacacgccatctgtacgatttggagcggctgatggatacggatttcggaaaggcagccttggccgatccgagaatgtatgccgagattgtcaggcatcgcagcatattcaatacgattcgcggagtcgattatcggacgcaccatccgagccggatcgattttattccgcccgaaaaattggcggaggtatggcgcagggattatgagcggatgcaggagtatttcatctatggagattcgctgccatacgatcgactgatcgcgcggatggcggagttgcgggatcggtttcggaaagttgtaatggaggatgattttttcagcgaatcggaattatgaatcccgagtattatttccagaaaggtcttcgtctgatcgtggcaagcgccgtgatttttgctttgatcgttttgttcagcgccatggtttcgcggggatttccgctttggctggcgcttgttttgcttgtccccgcaggacttggcgtgaccggattttactttttcagcgtgggcagttcggcggatctttcggagcgtttttttcgtcgttttgggtgtagtcagccgagaggcgaagagaaaacaacgacagaaggagtcggttccgaacagcggtgtgaaagaagcccggacgcgatcgtgccggaatccgccgttgtttctgccgatccggttccggacgatcggattctcgaaaatgcactcgccaccgtctacgaatataccgataaggatttgggcgatgccgttgacgggacgaatcggcaaattttgcgacgacgtttgctttatttggcatgtatggcgcctgttccgaatgatgtgccgcaggttcggcttcggcatgatcgggtgagctatggggatttgtgtcactacggttggaacgtctggaatgcttttaagggcgcgaccaatcgtttttatgaccagaccgaattggcggaatggctgaaagcgagcttcgagtctttggccaaatacaatacgaagacgttgcgggccaagcttcgggcgacggacggaggttatcgcatccgattgatcgataatctgaaagaatatatccaaaaataaagagctgtataaggatgagatattccctgcacccggtcggtgcagggaattttctttctgttgtcatgtaattgcaaaatgctggtaagtagcaatatctgaaattgtttgccggtgcaaatgcggtgattcgattgcaaaaacaggtgcaggaaaagcacctgttattttcgtcgccggacctgctgttcgggttcggttaaattatcgtattatggacttaaaacaattgagtgagctgggcggtgaagtgaatgtgaccgtccgtctggaagatctccggcaatggcacaaggagttgacggcagtcgcgtcgccgccgtccgtaatgccggttccgcaacacgcgggcgaattgtacacgcgaaaacagaccatcgcgttgttgggtgtcgattcctctacgttgtggcgatgggccaagagcggttatcttgttcccgtggagtacggcgggcagcgccgttatcgcgtggcggatgtgcaacggattctaaacggagacagctatgcccgctaaaacagtgaaaagagaaagcccctacctgcgcgtgggaacgaccatctacaagcgggtccggcagccgttgagcagcggccggagcgtcgagacgctcatcccgtggaatgtcgagaccttgcgtcaggactacgggaaaagctatctggcctgcattccgaaatacgacggcttttgcacggttcccgaccacacgaactaccgccgggagatcgacggtttcctgaaccgttacgagccgattccctttcagcccgccgatggcatctttccgcacatccacgactttttcgctcatatcttcggcgagcaggtcgaactggggtacgattatctgcaactgctctacctgcgccccttgcaacggctgccggtattgttgctggtgtcggatgaacgcaacacgggaaagacgacctttctcaatctcttaaagtcgatcttcggcggaaacgttaccttcaataccaacgaagatttccgttcgcaattcaatgacgactggatgggcaaactgctgatctgcgtggacgaggtgctgctcaaccgccgcgaagattccgagaggatcaagaacctatcgactgcacgcagctacaaggctgaggcgaaaggccgcgaccgccgggaggtggagtttttcggcaagttcgtcctctgctccaacaacgagcgcaatcccgtcctgatcgaggctgcggaaacccgctactgggtgcggcgcgtgccgccgctcccgtatgacgatcaacacctgctggccaaaatgcgagccgagataccggggctgctcttctatctgcaacaacgtatgctctcgtcacatgaagagagccgtatgtggttcgcgccccggctgctggtcaccgatgccttgcggcggatcatacactacaaccgcagcaagaccgaaaccgaaatgctgtcgattattcgcgatatcatggatgccgagaaccttgcggagtatcggttcgacgtgagcgatatggtcaatatgctggagatacgcggcatccgtgttgaccatcccaccgtgcggcggattcttgccgaaaattggcagctgcgacccgcaccaccgacttactaccaacgctatacgattacctacaacggcgaaacgcagcggcaggacagcaagacggcacgggtctataccgtcacgcgggaacaactcggcggattgctggacgatgctgcgatgtaagaatgttgaaaaaaggaagtagctttcttattttcataatcttacatctcttacaaatcctcttacaaagtcttacgggttctttcggacttacagcgccggatgccgtgtaagagatatgtaagacgccaaccttttctttcactggattttacactttttctcaacaaatttacggaaaaaatgactgtcataccatacagcaaccggatttccatccgtgattttctcgcctggcgcgggattcagcccaaatacgaacgcaacggctacggtatgtatctttcacccttgcgggaagaacgcacgccgagtttcaaagtggactacgtgcaaaatctctggtacgacttcggactgggcgaaggcggtacattgctcaccctcgtgatgcggttggagcggtgcgacagccgcgaagcggtccgacggctgcaaaacggtgaaaaaggagacacggggattgcttctatctcaccgggtattggtgagcctcttggcgttggcggggcattgtcggtcgtgcggccggccaccgtccccgcgctccgcatcctctccgacgcttcgctccggcatccggcattggtcggttatctcgcctcgcgcggcatcgtcccgccggtcgccgcggcattctgccgcgaggtccgttacgagataaacggccgcgcctttttcgccgtcggtttccgcaacgatgccggagggtgagagctgcgctccgcacggttcaaaggcggctcctcgcccaaacatatcaccaccatcgacaaccgttccgatacggtaatcgctttcgagggatttatggatttcctcgcttatctctcactgaaataccccgaacgactgcgcatcgacgccgcggttctgaactcggtcgtcaacctgcccaaagccgttccgtttatctcccgacatccggtgatccgcaccttcttcgacaacgacgaagcaggacgcaaggcaactgccgatctgatccgtctttgtccccgcagcgaggtaatcgaccaaagcagttttacaaggacgtaaatgactatctgatcgcccatataaaagaccggccgaatctcccgaaaacgacatccgaccggcagggtcacctttgtcggaataatctgcaagccctgaaagcggaaccggaggaaattgaaccaccgcgtcggaaagggataaaggtttaaggaaggcaaggttgtgttttcgtagacgaaaactgcgccttccccgctggccggcgtaaaatcccgctggtctgaacaacctatatagcatgaacaatctatcgaaacaacctgtcatggaaacaccgaagaaaacatacagcaaacagggcggtcggccgaaagtcggcatcggccgcatctgcaaatacgtcgtcagcacacgactcagccccgaacggaaactccgattctcggccctttgccgcgaggccgggcaaccgcctgccgaagtcctgcgccagctgatcgaccgaggaacggtgagggcgcggatcacccgtgaacagctggatttcatggcccaactcaagggcatcgcccgaaatctgaaccaactgacccggctggccaatgccaaaggtctggcggctgtcagggtacggcatgcggcgatcgtcacggccatcgaaaaactcctgaagcagatatgcgatggtcggtaaggtcatatccgcttcgtccttttcggggacggtaggctacgtgatgaaagaggaatcccggatactggaagctgaaggcattacgcctccggaagtgaaggacatggtgcaggacttcaaagaccagaccttattgaatccgcggctgaaaaacaccgtcgggcatatctcgctgtctttctcacccaaggacgctccgcggatgaccgacgccctgatgacgcagatcgcaaaggagtacatgcagaagatgggcatcaccgatacgcaatacctattggtgcgccatctcgaccagccccatccgcactgccatctggtctacaaccgggtcgggaataacgggcagaccatttcggacaagaacatcaagctccgcagcgccaaggtatgccgggagctgaccgagaagtgcggattgtatctcgcaccgggaaaggacgacgtgcggcgggagcggctgcgcgaacccgacaagaccagatacgaaatccacgatgcgatcaaaaggtgtctgccccgatgcgccggatggaaagggctggagaagcaactggaaaaacagggcatcggcatccgttacaagtattgcggttcgactgaccgcaaacaaggggttttgttctcgaaaaacggcttcgagttctccggatcgaagatcgaccgggctttcaactttacgaaactcgacaaccggttcaacaatattcaacaacaaacccaacaccgggcaacgctcttcgggaacctctcggcggcggcaggcaattaccgttcagcatttgcagggttgttcggcggtatgggtagcagcggcacgcgcgaagagccgtcatcggtaaacctcggaaaggcaggcgggattccactgccgccggccgattcgcccggcggagtgtccgccaagcagttacagcgcaagccgggagaaagccccgaaaagtatatagcacgaatcacggcactgctcaacgccgcggccgaggcgatggccatcgctgcgatggagcaccgccgcaggatggaagaacagaaaagaagagccaaaataaaactgtaaccgaattagaaaatctcaaaaatcatgaacgacgaaaataagatcggactctcgatcgaaatgtacgaagacctcaaagaaacgctcgtcaaggctgtcaaaagcaccaaagccaacgcgggtctggagaatgcacagctggaacggatcgagcggctgatagaggccacggagctctcgcaggggcaggtcgcacagatgctcgaacaactgcaacggcatacggccttgccgggagtaaaaaccgagcaggagcgggaatttaccgacaaatacaacgctctgttggcgcagttagcgggtaggctggaggtgatcgacaaagagatcaggcagacacatacattgatagagcaggtgaggcaagctgtcgaagcagcggtaaagcccgaaaacctgccagtgcgggagcaccggcatacttatacgctcgatatcagttcttcgaaaacatttttgacgatgttcgtcatgctgggatgtattttcctgcaaggcgcattcatttaccgaatctcagagaataatcggctgttagctgcgaacgacctgaaataccgctacgtgaaaatgcgtggtgagatcaaagaaaaggagcttatggagttggaaacgatattcagggatgagcagcacacggccatacgcgataccgtccgaaaccaagttgaacggtacaaagaagccgtaaggcggcgggcagaacaactagagcgggctgcaagcaaagagcgcaaagcgaaaaagctacttgatgatgcagcacagttgcggggaaaataatttattttccccgctataatgattcgttaattttgattgaccacctccatgttgttttgaaaatcaagcagttgtgttaatcttggatttgtgggcgtaaatggtttggagtcaataatataggggcgaacttttgcgttttaaaaatacgcataaaaaagcccctgttcttgaaaagaacgaggggcaaaggattttttgagggggctgtgtgggccccggcatgattgccgtccgcaggcatcgcccgttatttcagcttgcagagtttgcggtctgcgtcggttgcctcgcgtatggagattgcaaagcctccgccgcgcgccatctccacgtcgagttccgtgcgttgtctgaccttcccggtgcggatgacatatgcctgcggattggtctggtaatcggcatcgggggcatcggcgtagagcgtcgccacgtactccttaccgggatcgaggtagtcgaacgggagcgtcaccgtacgtcggttctcgtccgtcacgccgcccacgaaccactcgcccgtgtctttggccttgcgcgccacgacgatgtagtcgcccggttcggccagcaggtagcggctctcttcccagtccagtgcgacgtcctcgatgaaacggaacgcatccatgtatttctcatagtgctcgggcaggtctgccgccatctgcagcggcgagtacatcgtcacgtacaacgccagctggttggcgagcgtcgcgttgacgtgcgagtggttgccggggttgacctccgcgacgtccatcacgaagatgccgggcgtgtagtccatcgggccgccctgcaggcgcgtgaagggcaggatcgtcacatggtggggcttcgagccgccgaacgcctggtactccgtgccgcgtgccgactcgttgccgatcaggttggggtaggtgcggcagaggcccgtcgggcgcaccgcctcgtgggcgttgaccatgatcttgtggtcggcggcccggcggacggcatagaggtagtggttgttcatccactgcccgtaatggtgctcgccgcggggcaggatgtcgcccacgtacccgctcttgaccgagttgtacccgtatttgtccatcaggcggtaggccgcttccatgtggcgttcgtagttgcgcaccgaagccgacgtttcatggtgcatcatcagccggatgcctttcccgtgcgcatattcgttcagtgcggcgatgtcgaaatcggggtagggggtcacgaaatcgaagacgtaatccttcgtgtgcccgaaccagtcctcccagccgacgttccagccttcgacgagcagctggtcgaacccgtgtgccgccgcgaagtcgatgtaccgcttcacgttctcgttctcggcgccgtggcggccgctgggcctgcatcgggcgtaatccgtcacgccgagctgtaccgacggcacgtcgcgcgtataggcccagtcgctcttgccggtgatcatttcccaccatacgcccatgtatttcacgggcttgatccacgaggtgtcgtcataggcgcacggctcgttgaggttcaggatcagcttcgaggcgaggatgtcgcgggcgtcgtccgagaccgtcaccgtgcgccacggggtatggcagggcgcctgcatgtagcctttccacccctgtgcgtcgggcgtaaggtgcgaggtgaagatgaaattccggtcgtccaggtcgaggtgcatgcacgcatagtcgaccagcgccgcttcgtggatgttgatgtagagcccgtcgtcgctcttcatctgcagggccgtctgtacgcccgtgggcgagaagggcgtctgcgacgagttgggcgtgatggcgccgggcatcagctcccgtatctgcgagagtttcgactccgtgtagtcgtactcctgcgtgtcgtagtcgcccgggatccagaacgccgtgtggtcgcccgccatggcgaactgtgttttctcctcgccgatgacgaaataggtcagcgactcctgttcggggaattcgtagcggaatccgagcccgtcgtcgtagagccggaagcggatcgtcatgtcgcggcctgtcgcggcctgccgcagcgtgacggccatttcgttatagcggtcgcggatctcggcctgctcgccccatacgggacgccatgtctggtcggactcgctgcgggccacctgcccgagggtgaacccgtcgtagagcgataccgggcgccctggttcgcccttgcggatttcagccccgaattccagctttggggcttcgccgcgcagttcgagccccatgccgctgggcaggatcacggggcgctccttgtaatcgagcgtataggtggggcggcctccatccgccaggctgaactccaggcggaggcggccgtcgggcgagaggagcgtctcctgtgccgtgcaggctgcaccggccagcagcgcggagatatataaaaatattttcttcatggttcggtcttgttatttacgtttgaattctacgatcagcgcctgccgcgggccgaccgtggtggtatcgtccacctccgtggctttgcccgtcaggacgttgcgcccgtcgctcagccccgaggcgatctcggcatagtgcgaccacggcacctgtttcttgccccgcgagttgttgatgaagacgaataccgcgtcggtgtcgtcataacggaaataggcgtaggtgttgtcgcgcgagaggaagtgcatcgtgcggccgttgtggatcacgggcttcgacttgcgccattggaagagccgctgcgtgtagtcgaagagccccgcctgtacggcatcgcgctgcgccgggtcgaacaggttcaccgcgtcgccctcccagccgccggggaaatccacgcgcagcccgccgtgtccctgcgagaggtctttcgaggtgaacatcatctcgtcgcccgagaatatctgcgggatgccgcgcatcgtggccagcatcgccatcgagagtttcagccggtcggggtttctgcgtacgatgtcgccgatgcggtcggtgtcgtggttggcgacgaagatcatcattttcgacaggtcatggtagacgaaatcgtgcgacaggcagtcgtagacgcgcgtcatgccctcgccccagcggagcgagtcggtgggcagcgcccggcagatggcctcctgcagcgggaaatccatgatcgacggcaggtgcgagtcgaagccgtccttgttgggattgccgccctgccagtatgccagttgcgggatcgacgacgtccagcattcgcccacgatgttgaaatcggggtattccctgcgtacggccgcgcaccactcgctcatcggcaccttctcgttgtaggggtaggtgtcgacgcggaacccgtccaggccggcatactcgatccaccacacggcccattgcttgaaatattgcagcacatagggattgtcgaggttcatgtcgggcatcgacggcacgaaccagccgctctcctgcaggtcgaggtcgtagcgcgaagcgttgggatccatgttcgtcgagaagcagacgttcgtcccggtgtattcggggaactggtgtatccagtctctgaaaggcaggtctttcatccaccagtggcccgtgccgcagtggttggtgacgatgtccataatcaccttcagcccgtgctcgtgggctttgccgacgaactccctatacagttcgttcgagccgaaccgggggtctatgcggtagtagtcgccgcaggcgtagccgtggtacgaaccttcgggttcgtcgtccagcagcagcggcgtgggccatacggccgtggcgcccagccctgcgatgtaatccaggtggtcgatcatcccctgcaggtcgcccccgtggcggccgaagaaggcgctgcggtcggcgcgctcccgcgtgtggggcgtcgagtcgttcgacgcatcgccgttggcgaagcggtcgggcatcaggaggtagatcatgtcggccgtggtgaaactcttgcgtgcgaccgagccttcggcgcgtgccgcgatctcatagggaaccttgaactgtcgttccccctgcgagaatacgaggtagtaggtgcccggctccgcgtcgggtttcacctccacgtccacgaataggtaattgggactgtcggctttgtggcgggccttcaccccgacgccctgtccgccttcgatgcggacgtcgtatgccgcgatgccggccccgttgacgagcaactggagcggggtctgcatccccgtccaccacgagaggggttcgacgcgggtaacctcgcccgaggcgtctgccaccgaggcggggtcgaatgcggactgtcctgtccctgtgcaggagagcagtccggctgctgcgagtgtcatgaaaaatcggttcaaaatatcgtcgtttgtaaagttagcaaaaaatcggtttccagcgattcccgtttcgcccggggcatccctgtgcttctcgtgcgcatccctgtgcttctcggatggtttactgtctattcccgtcgggttctatcgggttcccggcgggttcccggcgctgtttccgcgcatccccggcgcatgtccgcaacttttatctcctgtcttgtgcgaagaccagccattgccatgcgggaagcacggtgcgggtgccgcccgtgtattccttcccggtgaagaactcgcggcgcgagccctcgaacggcaggtcgaatgcgacctcctccgcactgaggttcgcagcgactgtcacctcgttgccgccggccgtacgggaaaacagcatcaggccgtcgggtgttcgttcgccgagcgggtatgcggcctgcccgccgcgttccccggctgcgagcgccgggttctcgtggcgcagccggatcagggcggcgtagaaatccgtaaatccgttgcgttcccacgcggggacggggtctttctcgaagaactcgaagcggtggtcgaaccccatctcctgtccggtatagacgagcggctgcccgttgggcagcgtgaaggtcagcaacgccatcacgcgtgccgcgtcgcccatgcgctcgaattccgtcccggcccacgagttttcgtcgtggttcgaggtgaacatcaggcggaacgcctcgcgcggcatggcagcggcatccctggcgacgtaggcacgcaggtctgcggcgcttttccgtccctgtgcgatatcgttcagcaggtggtgcagctcccacgcatacgaggcgtcgaacgccccgtcgtgcaatgcgggggcttcgccctcggcgagcaggtagatgccggggtactctttccgcagtgcgggcagcgtctgctgccagaagtcgatgggtacctcgcacgccatgtcgcagcggaatccgtcgatgccgcggtcgagccagaaacgcatggcggccgccattgcggcacgcatgtccgcgttgccgtagtcgagcttggcgatgtccgtccagtcgtactgcacgatggtgttgccctgcgagtcacgtacataccagtcggccgggcgctcctcgatccagcgggcatcgggcgaggtgtggttggccacccagtccaggatcacgcgcagcccgagtctgtgggcttcggccaggaaccggtcgaaatcctccagcgtgccgaattcggggttgacggcttcgtagtcggagatggcgtagtacgagccgagggttcccttgcgctccttgacgccgatggggtagacgggcatcagccagacgatgtccacgcccagttctctgagccggggcaggtggcgtgcggccgccgccagcgtcccttcgggggtgtactggcgcacgttcatttcgtagacgaccgagttgtaactccagtcggggtgggcggccggttgctgcggccgtgtgccgcaggcaaccagtaccattgcgagaagtaatgcgggcaagcgtttcatggcgtgtcgtttagagcgtgaataccaccgacgaccaggcgcccatgagcagtttcgacgaagcgtcgccgcgctgaagtttcacttcacctgagacgcctacggccttgtccggttggtcggtaagggtcagtatctgctcctcccggccgaagttgtgcacgacgagcatccgttcgccgtccagctcgcggtaccaggccgcgatggattgctgcgaggtgttgccgtcgttgtagaccgggtgtttgaccatcttgccctgcgccagcacggggtaggtgttgcgcagccgggcgaacgtgcggtagaggttgagcagcgaaccgtcgtcgtcggcctgtgcctcgaccgagatcgccggggtcagcatctgcatgtcgatcttgcccgagaggcttcccgaagccagttcgttgcccgccttgtcccacaggatcggggtgcggacatattcgtcgccgttggatttggtgccccagtacccgagctcttcgccctggtaaatgtagggtgcgccctgcgccgtgagcagcacggcggccgccaccttcatcttttcggcggactgtcccaggtcggagcccgtgcgatcctcgtcgtggttcgaaagtttcgtggcttcgatataatcgctgcggtactgtgcgtagaggggctgcacgtcgaggatgtccttgacgaaatagcatccgatgccgttttgcagcgcccatttgagcttgtaccagaacgtgaattcgaacagcgccggcagcccccggtaatagggtgccgccttgtccgcttcgtcgagcatctcgcccaccatgtagaaatcgccctctccgccggcggccttgtagctctcgttcatgcggtcgtagaatttcttgaggaacgtggggttctcgtcgttgtaggcgttgtggtagatgtgcttcacggcatcgaggcggaacccgtccacgcccatgcgtacccacttgtcggccgcttcggtgacggccttgaacgccccggactgctcggcctcggcggccttgccgtagttgaggtcggcgaatgccgccgtccagaagtgcgaatggtacatcgtcggcagcgagaactgcacgttggccggatcggccgagcggttcgacatcagggtgaagggctccccgaaccggatgatcgtccggttgtcgggggcgccgtatttggtgcctgcggcccacgacgtggtcgaggtgcggacgaggaatccccagtcggaatcgaagtcgagcgtcagttcgtaactgttgccgcccctggcgtagaagcgtttgctcgtgccgttgccgaaatagaggtatttgtcgtccgcgccgccctgcgtattgtccgcatccgcggcatcggtcgtttcggtaacggtcaccgtcgggctgtcggcatttgtccagtcgagcacgaacttgaagcgcccggcggcacccgcccccgtgtcggtcgagaaccattgtccggcatcgtagcctgcggcgccttccgtggcgatctggtcgatccgcccggccgcgatgtcggcctgcgggtcttcggagaagatatagcggtcacggtaagggctcccttcggacgcggcggccgatttgaaccacgggtggtctttgcccgtatggttgagcacgtaatccaggtagacccggatgccgcgggcatgggccgcgtcgatgaatgccctcaggtcggcgtccgacccgaaggcggggttgaccgcctcgtagtcgagcacgtcgtaaccgtggtacgaagccgccggatggatcggtgagagccacacggccgaggcgccgagtgcgtcgatgtagtcgagccgccgggtcagccccggcaggtcgcccaccttgtcgccgttgccgtcggcaaagctgtataccagcagctggtagcttatgtcggcgcgtttgcggttgtcccacgcatcgggctgggcgacgacctgctcgccctcgaaatcctgggaggcatcgccgctctgtgtcacggtgacgacgaccggatcgcagcccggggcggtgaaggtaagcgtcgcggagcgtttcgacgactcgtttgcggtcgccgtgaccgcgaacgacgtggaggttttgcccgatgtgagggccggtgtgcaccatgcggtattgtcgctctgcgtcagcgaccacgcgcccgcatcggtgcgcaggtcgagcagccggctgccgcctgcggcttcgaattctatctccgcgggggtcacggagagcatactgccgccggtatcgccggtcttgtcgtcgctgcacgacacggatacggaaagtacgagtgccagcagcaggaaaagaaattttttcatagcggaatctcggttaaagttcgtttcggggcctgccgtccggtcaggggcggcaggccagaaacgggacggcaatctctgtgtgccgtcccgtgaaagggtggccgttattcggcctctgccggggtcttgccctcggacatgatgtatatctgcgaattcgcgaggtcgaaatagatgtcgtaggtgccgtcgagctggactttcatgttctgcgaaccgccgctggtgatgatgtcgacggccttgttgatgtcgaccgcaccgcccgacgccgtgccgtagttcttggagtcgtcccaggcgttgttgaagcggatcttgaattcgctggcggtggtcaggactacgcctttgcgaacgaggtaggcgccctcctcgctcatggagaaatcgcccaggtcaccccatccggtgatgttgccgaccagtccccatgtgtcggcgaccagctcgggcttggcgcctgcggccatcacgtaggcgcgtcccgcctcgggcagcagccagtagtcgtacgtgccggcttcggcgatcacggcattgaccttgtcggcggaaaccttgaaggccgagccgatcgtgcaggtgtaggggctgctgccggcgaatgcggcgtcggccccgatccactgcgactcgtcgccgctcttgaagaggaattccgagttggcggctacctcgacccctgcggccttgtaggccacgatgttcgagctggcgctctccatggccgtcgggccccagtcgggggttgcgacggtctggccgtggatgtaccagtcggccttttccggccccgggtcgggttcttcgccgccgcccgtgccgtagtcgccggcattgagttcgtaggtgatctccgcagagttgttcagggttgcgtatacgcggtagttgcccgccgtggccttgatgttgtcgccgttctgcgaaaggcgtccgtccgccccgccgaagtttatcgcccagtcgttgtccgcacggaatttgaattccccggcggtcagtgtgacgtcgacccagaaacgctgtttttgggtgtcgaaattcatctccgtgtcggtgtcccagccgcccggagtggcatcgccgataatacccatcgagttgaacgacagcttattgcttaacgttaatgtcgaacggtcgaatacgaagcggtagaagcgcttggaatagaccatgatgtttccggaaccgccgctggagatcagcgtgatcgacggggcttccgtttccggagccgcagcatcaccgtcggtgccccagttgcaggcatcgttccaaccggcttcgccgctcagtttgaagccgttggcggctttttcgcccaagtcaacgatagcttcgtaggtgacctcgtcgccggagaaacagaacagtccctgtgcgttgtcgaaattccagccgcagtaatcgccgattacccagacctggggataggtacgctcggccgtcgtcacggtcatgcggacggtggcgggggcggagtagaatttttcgaagtcggtgccgatcgtggcgctgatgtagaaatccacgtccgtaggttcgcccgagggaacccccaggccgccgtcttccacggacagcgcaaggatgttgttgaggctttcataggtctgttccgacgaggtgccgttcattcccgtgaagagcaccagtttcgcaccgtcgttgtacgaggcttcgatcgagtagttgatctgggtgcggacgccgaagtcggcggcgtcccaggtgaaggtctgcgtcgagcccatgttgtcgggcgtaatgacgatctccccgggcagcgcatgcagcacgggcgccacgaccttgtcggggtcgtaggcctttacctcgtcgagcttttggcaggcggagaggagccccgtcgcagccgccagcatcatcgcatatcgtgtaattttcatagtcgtacgatttttagggttggttatttatcggttgcgtttccgtagccgggattctggtgcagttcggggttggaagcgagctccgacgaagggatggcaaagattttcatgtaatcatcgaacccctgtccggtgaaggtgccgcccttgtatgtccagaggaacgacggggtggtgaacttgccgtagcggatcaggtcggtgcggcggtgcccctcccacatcagctcgcgggcacgctcctcgagcaggtagtcggccgtgaccgacgagggggccgataccccggcgcggtcggtcagctccttgagcttcggcagcgcggtgttggcctgtcccaggttcatgcaggcctcggcgtagatcaggtagatctcgcccaggcggatcatcgggaagtcgatgtcgctgtatgccttcgatgcagccgtggcaaggaattcgtcgttggtcatgtcgtgggggatattgttgaacttgaggcaagtccacccgttgaggaagacatagagcgcatcgttcatcgactcctggcggcctttgatgtagaacattccgccgcgtttgtcgttgaccgtatattcgcccgtggtgtagtccgcgttgcgggcgttgaaatatttctgtacgtattcgtagggtacgcggatgccggcccagccgttgttcacgccgttgatcttctgttcggccgtcacgtcggtggcggcgatggctgccagcgtcaggtacgacgtgccgccgtaggactgcgtctgctcggcgtcgtatgccacgccgaagatgatctccttcagggcgtcggcgttctcgccgttgtcgccgcggaagaggtcggaatactccgggcagagcgagtagcccatgccgaagatcgcttcgcaggcggatttggcctccgtccacatcggggtgccggcataaacctcggcattgaggtacatgcgggccagcaggccgttgaccgcacccttgtcggcacgcgggtagttcgagcgtgcggcaggcatcgcgctttcgtccgaagccaggtcggtcagctccgagatgcagtagtcaaagacatccttgcgcgaggcctgtttggggttcacaccgccgccgaagggcgaggtctcggtcgtaaacggcacgtcgccgaacacgtcgagggcgatccagtagaaataggcgcgcaggaaacgggcctcggcacggaagctctggatcctggcggccagttcgctgctcacgccgcggtcggagagtttgtccgaggcggtctggcgcaggtactcgttcacgtaggcgatgccctgcaacgtacgtacgtagacggcgtaggtcgcgtcgttgtcggcgtcggaccacgtgtcggtattcatggcgcgaacccaggcgtcgttctcccaggcgcatttgcaggcgtcggccgtaacctcctggatcgtccagaatgcgcggatgagctccgaggcgccgccgtcgctgacctgcaggtcggtggtgtcgttcgagacgaaattgaaatagagtttggtgagcccggccaggtagccgttctcgtctttcccgtagacggtctccgaggtcgagtcggacgggttgaggggcagggtgtcgagatccccgatgcacgaagtgagcagcatcgttgcgcctgccgccgccaaggcgaaatgttttatgtcgattttcatggttcgttcgtttttagaagtttacattcagacgcagcgaataggtgcgcgggcgcggccagatcgagccgtcgatgccgttgacgcccggtatttcggggtctacgccgctgtaatcggtgatgacgaatacgttctgcacgccgaaggcgacgcgcatcgagcccttccagttgccaatcttgttgaacgtgtacccgaggttgatgtcgtccatgcggaagaacgaagcgttttcgaggaacatgtccgaataccactgctcgccgctgttggccttcgtaaagccggtcttcttgaccagccgtgcgaagttgggcaggttgccggcgttgatgtcgatgttggacgtcgagttggccgaggcgaagtcgttgaagacccagttgcccgccgaaccgtggccgttgaagccgaagtcccagttcttgtagctcagcttgaggctgatgccgtagaagaagtcggggttggggctcttgtcggtcatgtaacggtcgccctggtcgatctggccgttcttgttgcgatccaccaatgcgttctggatcggcttgccgtcctggtcgtaaacctgctggaagcagtagtaggtgtagggtgcataacccaccatgtggcgctggagcaggttgcccgtacccttggtgatgctgctcacctggatggcgtagtcggggtcgtcggtgttgttgagcttggtgaactcggtgtgctggaacgtgccgttgaagccgaccgtgaggttccagtccttggtctgcacggggatgaaattcaggttgaactccacgcccttgttctccatcgagccgatgttggtgagcaccgtgttgccgaagttcgagcccatgggggtgatgacgttgttcaggaggtcgtccgtctgacgcaggtaccagtcgacgctgccgttgatgcgcccgccgaggaacccgaagtcgaggccgacgttgtaggtcgtcgtggtctcccatttgatgttggggtcgtaggcgcccggcgtgaggtagaacatgtgcccggcgctgcccatgtaataggtcttatagacgtcggtcgacatgtagtaacgcgccaggtagggataattggagccgatctcctgctgcccggtctgccccacgctgacgcgcagcttgagggccgagacggcacgcgaatccttcaggaaattctcctcggcgatgttccacgcaaaggcgcccgaagggaagaggccccagcgggtatccttcgagaaacgcgatgaggcgtcgtcacgcagtgtgaaggagaagaggtatttcgaggcgatcgaatagttcaggcgtccgtagaacgagagcagataattctcctggcggttgaacgggtagcgcgaatcctcgcccttctgctcgtgcgtctcgttgaaataggataccgagtggtcggagctgtagaaatgctgccacgaataaccggccatcacgtcgaggtggtggatgccccactccttattgaagttggcgtagaattcgagcagctggttgcggcggaagttcgtcgtccacgaatactgtccccagccgcgggcctcggtgtcggtgtatgcctggaacgagccggggttcacgccgtcgtaggtcttggcgctcgatacgtcgaggccgaggttgaggttgaagcgcagcgcctcgaagccgtgaaccttatagtcgatctgggcgttgccgatgaaacgcttggcacgcgccgtattgtcgcggtcgtagagctgcgagagcgggcctgcgcccagcagggtgttgggcgtgaagtcctcgccgcggcccgatccgtagttccagtatccgttggtggtcgtgtagtcgatcgaaccgtcgtcgttgcggaaataggggtcgatcgtggggttgaagaaggccgccgaacccaccacgccgcccgaggcgtagcgctgcgacgtgatgacgcccttggcgttgaggttgaccgtgaggtgcttgtcgaagaagttgggcgagaggctcaggtcgagcgtcccgcgttcgtatttcgatgtttcgagcgtaccctgctggttggtgtagcccaccgatgcgcggtagggcatcctatcgttgatgttgccgatcaggctgacgttgtggtcatgcgaaatggcggtgcggaagaccaagtcctgccagttggtgttcttgtcgccgagcatcgactgcaccttgtcgcccgtggtcgtacctgcggggtatacctggtcgatgtaggtgcggaactcgccgggcgacatcacgggcagctcgtcggagttggtctggacgctcacgctgccgctgtacgatacgcggggcgtgttgccgcgccccttcttggtggtgacgaggatgacgccgttcgaggcgcgcgaaccgtagatggccgccgccgaagcgtccttgagcacggtgaaggattcgatgtcgttggggttgatcgtctccagcgggttggccatacccttgccgccgtcgactgcgatgggcaccccgtcgatcacgatcagcgggtcgttcgaggcgttgagcgaagccgcaccgcgcacgcggatggtggcgctcgatccggggcctccgtcgccggggatgatatgcacgcccggaaccttacccttgagcatgtcctgtgtggagaccacggcgccgcggttgaactcttcggccttgatcgccacgaccgaaccggtcatgtcgttcttcttgaccgtaccgtagccgatcaccaccacgtcgtcgatacccatggcatcctcttcgagcgtgaggtgcgccagcagcgacgaactggccaccaggctgacggtcttgtaaccgacatagctgacctcgatgaccgactcggggccggcggcgcggatggcatagtcgccgtcgatgcccgtcgagacaccgttggtcgtgcccttttcgacgacggtagcgcccaggatcggcatcccggacttgtcgacaactacgccttttacctcataaccagcgttttgcgccagcgtgagggggggggtaaattgacatatgagcaagatacccgcacacatagttaaaaatcgtttcataagaattttggttagtttataagttgattttatggattgtaggtcattgggccttgtgttctttgaccaggaagaccgacacggcggccagcagcatgaataccccggcgagcgccagcatgtcggccgcatcggaggcgaagcagtacttgacgatggcaccgccggtcagtccgatgacgatctgggggacggtgatcgtgaaattgaagatacccatgtatacgcccatgcggcgtggctcgaccgcgcgcgacaggatggcgtagggcatggcgaggatgcccgcccaggcgatgccgatccccaccatcgggagcatcagcgcgtactggtcgtgcagcaggcacaaccccgcgaagcccagcgccccggcgagcaggcaggcagcgtagacgggtttgttgccgtagcgcgcggcgacgcgcccgaggaacagggcggcgatgcaggcggggatggggtaggtgccgttgagcacgccgacccatgtctgcgtggcgccggccgagagcacttcgcccgtggcatggtcggtgactacacccgtgatggcgggtttgaggtaagtccacatcaggaagagcgccgcccacgagaagaactgcgtgacgcccagccgcaccatcacgccggggacgttgcgcatgaggccgacgaagctcatcggtttggcgtcctcctcggagaggttgttgtagcgggcgaactccccgggcggatattcccgtgtcttgaacgaggtgacgagcaccgtgagcagcaggatcgcgcccccggcatagtaggagtaggcgatgtgcggcgaaacatgccccggagcggcctcgtccgacacgccgagccatgtcatgacgagcggcaggatagcgccgacgaccgcaccgaggtttatcaggaaggtttgtaccacgtagccctgtgtcttctgcgaatcgtcgagcatgtcggccaccagcgcccggaagggctgcatcgtgacgttgaacgacaaatccatgaacagcaggatgaaagcccccatggcgagcggggcgaaggcgagcagtttggggcagttgggcatgagcaccagcgccagcgccgagatcagcgacccgcccaggatgtaggggatgcggcggccccagcgcgtccaggtgccgtcggaaaaaagccccacgatgggctggacgatcatgccggccagcggtgccgccagccagaagtagctcaggtggctgacatctgcccccagcgattcgaagatgctcgacgtgttggaattctggagcgaatatccgatctgcacgccgaggaagccgaagctgaggttccaaatctgccaaaatgagagtttaggcttggtcatttcggtttttcggttggttttcaggttatacaaattttaataaaaaatccggacggcgaaccgcagggcgacgaacggaaggttcagccggatgaacgggcggatttttgcgacgaacggtagcccgcgggggacgatttggaatttccgcggaaaaacactacctttattcgtaataaacgaaacccgtatatactttaatacagcctcagtcagcctatatgcgatcgctcaaagtgtccggaatcatccacctgttcgccgtgctccatgccgtggtcgccctttcgtgccatctggcggggatcaacgacgagttggtgctgacgctgctgacgatcgtgctgatcgtgctgatctgcctcaaacggggactgaacgtggagttcaccgctgccagcgtgatcgtcgtcaacgtgatcggctacctgctgggtacgggcggtgcgcagttgatcgagctgttattgcacgcctcgcccgtggtgcatgccgtctcgaccttcatcaccaccgagatcctgggctggagcatcgtgtggttcaccaagttgttccgccgcggcgacgacacggcgagccgctcctcggcctggacgccccgcatcgggttgctgctgctggccgtggggggggattttcgtgctgaggctggcctatgtcgagcttttcgcctcgccctccttttccacagaccgcctctaccacatggccgacttgctggcttccaattccgcggcactgattatcctgctgtgcgtcaatatcatctatgtccggcatacgcgcaggcgtgaaacccgacacggcccgatcgccgaaatcgcggccttccttctgttcgtgctgctcacgtcggcctgcgtggcgctcattacggggctgcacctgccgttcgccttcgaccgctcgttcaccgcacgggagttcctgcaactgtggatcgtcaccctgctggtcgaggtgaccctctattcggtcgtatttatggtcgattacgccctggtcgcacgtgccgtgctgcgtgccgagcgcggcaaggcgcaccaggcgcagttccgttacatgaaactcaaacagcaggtcaacccccatttcctgttcaactcgctcaatatcctcgactgcctggtctgcgagcagcgcacggagcaggccagcgcctacatccataaactggcgggcatttaccgttacatgctccagaacgaggaggagacactcgtgcgcctgcgcgaggagatggccttcgtggggatgtacgtcgacctgttacaggtgcgtttccccgaagggttccgcgtggagaccgacatttcggatgaggccatgaaccgccatgtcctgccctgctcggtgcagttgctgatcgaaaacgccatcaagcataactcggtgggggccgaccggccgctggtgatccgcatcgtcgccgtggccgaggccgtgacggtgtcgaacaaccttcagctgaaggtatccggcaacccctcgacccgtgtggggctgaactacatccgccagcagtacctcgacctgtcgggcatcccgatcgggatacgccgtaccgataccgaatattgtgtcaccttaccgttgctgtaatatgaacgtactgatcgtagaagacgaaatgatggcccaggcaaacctggcgcgagcgctgacccagcattttcccgacgtacggatcgtcgggacgaccggctcggtcagggaaacggtgctctggctgcgcacgccggggaacagtgccgatgtgattttcatggacgtggaactctccgacggggattgcttcgagatattccgccaggcggacgtaacggcgcgggtcatcatgaccaccgcatatgacaattacgccgtgcgggcgttcgaggtcaacagcatcgactacctgctcaaaccgatcgacctcgcggcgctgcggcgtgccgtggaacgttgccgtgtgcggagcgggggcatcgaccccgacgtattgctgaacgcaatccgcagcccgcgcgaatacaaacagcgctatgtcgtgcgtttcaacgaccggatcgtcccggtgcagaccaccgacatcgcctatttctactcggaagagaaaaacacctaccttgtcacgaacgacaacaaccgctacatcatggatcagtcgctcgacgtcctttcggacgaactggatcccgggcggtttttccgcatatcgcgcagctgcatcatcgccatgccggcgatcgtcagcatcgtgaaatacctgggcaaccggctgaagatcacggcacgtccgcgtccggagttcgagatggtggtgagccggtcgcgggtcgacgacttcctgaagtggctggaggggaatggctgagccttggtcgcgacgggcaggtcttcggccccccccctccgtttccgggttttgtcctccggccttccgggttaccgttcctgcggcgggcgggggctccggttccggcgggagaggggagttccgcagaggagttcctctggaattttccgccgaggactgaaagttcactttgaaggatcatgctgcgggcgttcctccggaggcgtccttcgagggcttcggttgagagatcccaggaagggattcccgtggaaggtttccgcaggggcacccgggaggatggcgcggcggcatgataaaaggggcgctccggaaattccggggcgccccttatttttgcggccggggtcggcgctgccgcagtctgcccgtcagcggcgcccgctgcaggcgatcatgtcgtgcagcgactcgttgaaagtctccttgtgcagcagttcctcgagcgggaggtgcattcggtaacgccagtagtatcgggcgacggccgggacgttgatgcgttccttggccgggtcggggtagcgcagttccccgtcggtcgagaaccagtcctgcaacggcaggatggtgagcatcgccggggaattgaggtgcatgtcgaggatgcgccggcatatccacggctcgcagaaatagggaacgtcgcccccgatgccgagtgcttcgtggtagaagcgcgccgtgagttcgcggtcttcctcccaccatgcccgcagcgggttcatgtcgtgcgtcgaagtggtgcagaccgagaaataggggtagtgcgccgggtcggcgaagagttcccccggcgtcttgggcatgcgctggatttcgagcgagaggatttgcagttcgtgcatcgtctcggggacgctgtcgggaatcatgcccaggtcttcgccgcaggtcagcatctcggtcgccgagaggagcaccgggagcttgcgcagggccgactcctgccagaaccggttgtggcggcggtaaaagaagtcgtcgtgaagccggtcgaaagtgtcgcgccgctgcgggtcgagggtgcggtacatataggtcgattgggctgcgatgcgggggtggaaaaaacctttgcggcgcgggtcctcgatgaacagcacgtcgtcgagcagcgtcatcagcccttcgcgcaggcggcttcggcgcggatcgtcgccgggaaagcgctcggcgaccttgcgttgcgtcgcataggcgggcagcaaccggccctccttcatgcaggtcgtgcgcacttcgtcggccagctcgccgaacagctcgccgagcatccggtcgtcgggcgcgggaacggtgaagcgtcccccggccgtatcgaagcccatgccgcgcagttcgtcggcggagtagggcagggcgggattgaaatagcccagcaggccgtgaacggcatgtacgggaatctcccagatgcggaagaagccgaggatatggtcgatgcggaaggcgtcgaagtattcggccatcttggccatgcgtgcccgccaccaggcgtagccgtcgcgtgccatgcgttcccagttgtaagtcgggaatccccagttctgcccgacggccgagaatgcgtcgggcggagccccggcctgcgagtccatgtggaacaggtgtgggtagagccatgcgtcgacactcgtgcgactgatgccgatgggcaggtcgcccttgaggacgatgccgtgggcgcgggcgtaggcgcagacctcggacaactgcgtatgcaggtggtattgaatatagcagtggaatgcgatgtcgcggttgtggctgcggcagtaggcgtcgacggttttgcggtcatagcgggcgaagccgccccagcgggtgaagtcgggcgtgcccgtttcgtcgcgcagcgtgcagaaggcggcataggggatgagccagtgtctattggcggcgatgaagtccttgtagtcgcggcgtgccgcagtgcgggttccgtggcgttcgaacgcccggcggagcagccgcagtttgtgccggttgacccgttcgtagtctatttcggggagtgcgttcagttcgttgcgcagggtgcggtactcgtcgtcctccacgacgcccgcggccggcagccggatgaactgcgggtgcagggcgaaggtcgaattggcgttgtaggggtaggagtcttcccatgtaccggtcatggtggtatcgttgatcggcagtacctggatgacgcactgcccggtggcggccgcccagtcgatgagccgtttcaggtcgtagaactcaccgacgccgaaatcctcttccgtacggagcgagaagaccgggatcgccgtcccggcgccctgccatctgcgttcggggaaccgcgggtacgccgcggcgtcgagggcgtgttcgccggcgccgggcagttcgccccaggtgcggttggcaccctcctcccacaggatgggggtgagggtcttgcggtcggcgatcaggaatttgtattcgaaccggtgtgcggtatgtagcgtgagttcccattccgggaagcggctgtcgtccatcgggacgattcgtttccagtcgcccagttcacggccgctgccggcgacggcgagcgtttcgtccggccgcagggtgggcaggatgacgcgcagggtgatgttgccggctgctttcttcggattaccggttttcccgcggccgaagatgccccgggtgaatgccgaggagtagaacggcgtgtcggagggcatctcctgccagcggtcgcgaatgcgcagcgtacgcaccccctcccgggacgggatccgcagcgtgtgcggccgccattcgctgcggatgcacacgccctcgcgctcgacttcgtaacggtattctgccggctgcgccgcaggggcgtaccgctctacggcgcaggtccagacgccgccgtcggcgtattgcagggcgatgcgccgcttgccgaggcggagtacgagctgttcgccccagcgggtacggtattcgatgctgatcaggagtgtcattcgtatattcactttaatgattataactttgaggaaataaagacatcagagcatggaataagtccgaaatttcattggtctacgagaccggggacaatgttccggccccatgctgccgtttcctgttacaatccaaataaatctggatcaaagttttcggttaaatttgtttttatttcatttgcaatacattgcgattcttgatgagtttcccggccaaaggtcaaggcacagcgtgtctccgccggccttcgatcgagtcggtgcggagtcacgatgtgctttgacctttggctcttgcaaaagccgtgatttcagaacccgtaaaaatccttcggtagacagactttccacagcggtcagtattctgccgcatgttcctgtattagtttacaaaggccagaggagcattttacattaagcggactccaaagccgcacgcaatatgtagtattctctctgggaaaatccgtttaccggaaggggttgcttatgacacgacactattgacatattcggtctggtgtttcaacacgaagtatagtctatttaccagtttgcgggcgacctttacgatggccttgctcttgggcatccgcttgcattgttctgtataaaacagattcatcgcgggatcttggcgtatagccacccatgcagcctctatcagattacagcgcatgacggcgtgttttcgcacggtaatgtctcctgttccgtctttctctccgctgctatggcacatcgggatcatcccgatataggcggccagttgttcggcattgcggaaacgggttatgtcgcatatctccgacagaaacgccattcccgtagtctgcccgaaccccggaacgctcataatcaaccgctgcggttcgcggaatcggtccgccttggccaaggcccgtaaagcccgtgtcatctccaacttctgacggcgtagttcctccagatgccggagctgaatgtcgagggcctgacgatcgctcggagtgagtgtctcaacctctttcagccatgcgaaaaagcgtttcgaccagttggagaaaggttcgaggaactcctgcggaatcccgatgcctaaacaccgtaactgggacttgatccggttcttctgacgggtcgtgtctttggtgatcgagttcttcaatcttatcaaggaacgcatttccaacgatacactgtccggcgtataaatgcctttcagttcgttggctcttaaactccgcgccagcttgccgctgtccacggcgtcactcttacgcagcttttcgctgctcttggtcggtacgtcggccgggttgaccacgatgttgtcgatccccaatgccgtcaggcgttcgtgtatccagaatccgcaaaagcccgcttcgtacaccgaatgatactcggctcccggataaactcctcgtcagaaatccgtgcaacgcttccggggccggattttgactgaatttcttcagtacagaggtcgcggacaagaccgttaccgaccaactcttcaaatggacgtcgattcctacataaatcttttgtcctttgaaataatttcatttcttcgttctctcatggctatcgtcgttttagttagtaaaggtctcgcaactttaatctaaccaaaatctcgatagctttttcatctatccgctttcatcgcagtcaactctgattgtaaacatagggattacatcagaatctggatagttcgtcgtttgtttggaatcggtttatacaaaattacaaaaataatctggttttgtctttctggcagggaaaaatcagagcccttctccatgaaattgcggacacgatgcggacacggaaaaagaaaaatcccctcagagtttcctctaacgggattttttgtgcccaggacaggaatcgaacctgcacgccttgcggcacacgcacctgaaacgtgcgcgtctacctattccgccacctgggcattattggaattgcggtgtgcaaaagtaatacttttttctgaatcgccaactatttttgcgaaaaaaatctacttgctcagaaatttatactgaaacagaagcagatagactaccgccacggagatgtaggcgtcggccagattgaagatcgccccgaagaagtagttgttgctgtcgaccagaaagctcaggaaccgcggcacgttgttccactggaacagcggaaaatagaacatgtccacgacctttcccatcatgaagcccgcgtaatgtccgccgaaatgcgctaccgcgtacggcgtcgattccgaaaagatcagtccgtagaaagcgctgtcgataatattgccgagcgcaccggccatcaccagcgccagaccgacgataacccccttcggcgtatcctcccggcggcggagcagatgatgcatcagccagccgatgagacctaccatgacgatgcggaatatgccgagcagcagttttccccagtcgaatccccctttcgaggcgatgtgcatgccgaaagccgcgccgttgttctcgataaaccgtaattgaaaccagtccgggaatacgatgatcgactcgtcgaggtgcatgtgggtcttgacccagattttgagcagctgatccgcgatgagcagaatcaggatgagcagtgatatttttttgaagttcatagccgtcggattatctgccgcaaaaatagtaaaaaatctctgttttacggggtgccgtccgattttactcgtcctgcggacaattatattccccgaacgggcctttcggccggcaataggggccggatggaatcccttgttgccgaatcgggatacgtccgggcccgcatcatgcatcatgtcgggtgtcattaatatatataggtaaaaagcgttattttgaagaaaattgaagatttttcaaaaaaaaatgcgaaaatgcttgcaggttcagaaaaagtcactacctttgcatccgcgttcaagaaaaacggatgttcttacaaagactgaaagtttacaataaaggagcttaaagctctgtgtaagcgcgattttccgaaacgtaaagttcttgaaaaagatttttgaaaaaagatttgcaggattaaaaaagatgacttatctttgcagtcctttcgcactacaaaatgcgagactttttcaaactggttctttgaattactggttatattttgagagaaaagaaatgtagtatttatctgtcaattttccttttaaggataaacgaatagtcaggactctaacaaaacatttataaattttatacaatggagagtttgatcctggctcaggatgaacgctagcggcaggcttaacacatgcaagtcgaggggcagcggggagtagcaatactccgccggcgaccggcgcacgggtgcgtaacgcgtatgcaacctacctttaacaggggcataacactgagaaattggtactaattccccataacattcgagaaggcatcttcttgggttaaaaactccggtggttaaagatgggcatgcgttgtattagctagttggtgaggtaacggctcaccaaggcaacgatacatagggggactgagaggttaaccccccacattggtactgagacacggaccaaactcctacgggaggcagcagtgaggaatattggtcaatggacgcaagtctgaaccagccatgccgcgtgcaggaagacggctctatgagttgtaaactgcttttgtactagggtaaacgcttctacgtgtaggagcctgaaagtatagtacgaataaggatcggctaactccgtgccagcagccgcggtaatacggaggatccaagcgttatccggatttattgggtttaaagggtgcgtaggcggtttgataagttagaggtgaaataccggggctcaactccggaactgcctctaatactgttgaactagagagtagttgcggtaggcggaatgtatggtgtagcggtgaaatgcttagagatcatacagaacaccgattgcgaaggcagcttaccaaactatatctgacgttgaggcacgaaagcgtggggagcaaacaggattagataccctggtagtccacgcagtaaacgatgataactcgttgtcggcgatacacagtcggtgactaagcgaaagcgataagttatccacctggggagtacgttcgcaagaatgaaactcaaaggaattgacgggggcccgcacaagcggaggaacatgtggtttaattcgatgatacgcgaggaaccttacccgggcttgaaagttagtgacgattctggaaacaggatttcccttcggggcacgaaactaggtgctgcatggttgtcgtcagctcgtgccgtgaggtgtcgggttaagtcccataacgagcgcaacccctaccgttagttgccatcaggtcaagctgggcactctggcgggactgccggtgtaagccgagaggaaggtggggatgacgtcaaatcagcacggcccttacgtccggggctacacacgtgttacaatggtaggtacagagggccgctaccccgcgaggggatgccaatctcgaaagcctatctcagttcggatcggaggctgaaacccgcctccgtgaagttggattcgctagtaatcgcgcatcagccatggcgcggtgaatacgttcccgggccttgtacacaccgcccgtcaagccatggaagctgggggtgcctgaagttcgtgaccgcaaggagcgacctagggcaaaaccggtgactggggctaagtcgtaacaaggtagccgtaccggaaggtgcggctggaacacctcctttctggagagtgagactattcgtcggcagatgagtctcgttcttttctctcgaattaacctgtaatttaataatatgagggggatttcccgtggacaatagtcccgtagctcagttggttagagcactacactgataatgtaggggtctgcggttcaagtccgcacgggactacacctaacaacgggggattagctcagttggctagagcacctgctttgcaagcagggggtcaagggttcgactcccttatcctccactaagatcgaaaattcgatcaacgttcattgacataattaaggagatgagataaggtcatcataattacaataggggttatgatgaatgtaagaaagtaataaagggcgtatgggggatgcctaggctcttggaggcgacgaaagacgtggtaagctgcgataagcctcggggatttgcaaacgagaattgatccgaggatttctgaatgggacaacccgctaggcagaaggcctagcacacgaaagtgggccaaccctctgaactgaaacatcttagtaggaggaggaaaagaaagaaacatcgatttcctaagtagcggcgagcgaacgggaagaagcctaaaccatacttgttacggcaattatggggttgtaggactgcaatattcaagtgactgtcaactggaatgttctggaaagttcatccgcagagagtgaaagactcgtacaggtaagcacgttatgcgatagcagtatcctgagtagggcgggacacgaggaatcctgtctgaatctgccgggaccacccggtaaggctaaatactcccaagagaccgatagtgaaccagtaccgtgagggaaaggtgaaaagaaccccgaacaggggagtgaaatagaacctgaaaccatacgcttacaacctgtcggagcagcttcgtgctgtgacggcgtgcctattgaataatgagcctacgagttactaatcactggcgaggttaagtgcacggatgcacggagccgaagcgaaagcgagtcttaatagggcgtttagtcagtggttgtagacgcgaaaccttgcgatctacccttgagcaggttgaaggttgggtaaaaccaactggaggaccgaacgaataagcgttgaaaagcttctcgatgacttgagggtaggggtgaaaggctaatcaagctgggaaatagctcgtactccccgaaatgcctttaggggcagcgttgtaataaagagtctactggaggtagagctactgattggatgcgggggcttcaccgcctaccaaatcctgacaaactccgaatgccagtagtatgatttacagcagtgagcgaccgggtgctaatgtccggtcacaaaagaggaacaactcagaccagcaactaaggtccccaagagtatactaagttgatctaacgatgttttgttgcagagacagctaggatgttagcttggaagcagctattcattcaaagagtgcgtaacagctcactagtcgagcgacaaagcgtggataataaacgggcatcaagtataccaccgaagttctgggcacgaaagtgcggtaggggagcattccattcagcgtcgaagccgaatcgtgagatttggtggagcgtatggaaaagcaaatgtaggcatgagtaacgataatgcgggagagtaacccgcacaccgcaagaccaaggtttcctgatcaacgctaatcggatcagggttagtcgggtcctaagggtaagccgaacggtgatctcgatggataatcggttaatattccgatactgacatatacctcgatggagagacgaaggaacgtaagtgccgccgcctgacggaataggtggttaaagggcgtaggtatagggacagattaagagttagtccttgctgaaccccgacagtacagagagcctacgggcaatttgatagtgcacccaagtcgacttccgagaaaatcttctaagttatagtatatgtcacccgtaccgtaaaccgacacaggtggtcgaggagagtatcctaaggtgctcgagtgaatcacggttaaggaactaggcaaattaaccccgtaacttcgggaaaaggggtcccaccgcgaggtgggcgcagcgaagaggtccaggcgactgtttatcaaaaacacagggctctgcaaattcgaaagaagacgtatagggcctgacacctgcccggtgctggaaggttaagaggggatgtcatcgcaagagaagcattgaatcgaagccccagtaaacggcggccgtaactataacggtcctaaggtagcgaaattccttgtcgggtaagttccgacctgcacgaatggtgtaacgatctggacactgtctcaaccgtgagctcggtgaaattgtagtcccggtgatgatgccgggtacccgcaacgggacgaaaagaccccgtgaacctttactatagcttaacgctgaatttgggtacacaatgtgtaggataggcaggagactatgaagcgggtacgccagtattcgtggagtcaacgttgaaatactgccctttgtgtatttgagttctaaccctcaagaggggacaccgtttggtgggtagtttgactggggtggtcgcctccaaaagagtaacggaggcttcccaaggtaccctcagcacgaatggtaaccgtgcgtagagtgcaatagcataagggtgcttgactgtgagaccaacaagtcgatcaggtgcgaaagcagggtatagtgatccggtggttctgcgtggactggccatcgctcaaaggataaaaggtactccggggataacaggctgatcgccgccaagagctcatatcgacgcggcggtttggcacctcgatgtcggctcgtcacatcctggggctggagaaggtcccaagggttcggctgttcgccgattaaagtggcacgcgagctgggttcagaacgtcgtgagacagttcggtctctatctgttgcgggcgttggaagattgaggggtcctgactttagtacgagaggaccgagttggacgaacctccggtgtatcggttatgctgccaagtgtaccgccgagtagccgcgttcggtttggataagcgctgaaagcatctaagcgcgaagccatccccaagataagtcttcccttgaggggcgtaggagacgactacgttgataggctgcaggtgtaaagacagtaatgtcaaagccgagcagtactaattacccgaacggctttcttacagatttctttatctcatttccctaatatgtcaactcataccgagtgcgacggattgtgatagctaaaagtatcactcgcatggcttcgatgagtttgaagcaacgttggacttcgtccttcgttttcttcgctcgacaaagtgaataaattctctttgtactcgcttatcgaaaacgttcttttaggtggttatagcagtgaggtcccacctcttcccattccgaacagagaagttaagctcacttacgccgatggtactgcggttttcccgtgggagagtaggtagccgcctcttcaaggtcagatcgaaaggtctgaccttttttttgtgcttgtaattttgctgtcagcttctgaaaaacgatcgctgacccttcggggcgggacgaagccgctgtttttatttcttacatcttttgtgaaacccgcagtggctgcatgtcaattcgtaggtattcttgtggacggagagtaggtgcaatgaaatgtgatggcatttggagcagcgcagtgtcgataataacaattcatagtgtctgaacagggggatattcatgctgcttaccgcgatgcaggacaatccgaaccacgggttttggcaggcaaatgcaaggagcaacccgcctgccattatcagagaaagtagggccagtccggacaagcggatgattctgttctgcatgtgtttcgagaaccagagcggcagtgtggcgcaaatactgactgaggcagggacgaaactgatgcagattagcagtagatagctattcataatatcagtcagccggtccctcggcgtatgtaagtgggattgtagcataaaaaacgtgggacaaaactcgtatatctgcttttcgaggtcttaggaaaccgtgtagtacaaatatagaatgaagcccacgttggaaacgtgagcgtcaaacttcattcctcgtactacttcagaaagttcctaagtttcgaaaagcaaggtataaagctaacgctttttatatgtgtgccctgttatttttgaatgcgagggcgtaataatctgaattggaggtcttctgttgttaactcataggcagcggtatttaatattcgtctccgcaaatatatataaaaaatcggaattgccgaaatgggggccgagcaccggcatcgtatggaaatttgattatctttgctgcaacacctgaaattgaaaaaatgctcgaaattcccgaatcttactcgtttgcacggcaagctgccgatatgctctccggccgcacggtcacggatgtattcaatgccacccatccccacaaatttacttggtacttgggagatccggccgattaccgggcacgactcgtcggtaaaacggttcgtgccgccgaagggcacggagcattcatcgacatgcttctggacgatgagacgcatatcgctctttccgatggcgtcaatctgcgttatcatgcgcccggagcggaggttccgccgaaatatcagcttctgatcgctttcgacgacgatagttttctggtttttacggtcgccatgtacggcgggatcatcgcattccggaagaatttcgacaatccgtattatctcggcgcactctcgaagccctctccgctggacgacgctttcgatgaagcctgtttcggccggcttatctccgatgccaagtccaatttgtcggcaaaggcgttcttggcgacggaacagcgtattcccggactcggaaacggtgttttgcaggatattttgttcaagtcgcatattcaccccaagcgcaagctggcgacgctgggtgatgcagaactggggcggatgtattcatcggtgaaatcgaccctgagggatatggcggatcgcggcggacgcgatacggagaaagatttgctgggcaagcccggcgggtacaagaccctgctctctaaaaacaccttcgcggagccttgtccgggctgcggcggtgcgattgtcaaggaggcttatctgggcggagccgtctattactgtcctgtctgtcagccgctgataaaatagcgagacatgcaaaaaagccgcccaaaaaggggcggcttttccgttgcatgagtgtgccaatgcgaaggctggcgtgctgcggcgggttttattccggacaaccggttttattccgaatatgctggttgccggacttttcggccgttgaacgcggggtatccgctgcggcttgacggcctactgctggtgtgcggctacgtaggcgtcggctttctctttcatgcgcgcagcgcgtttttcgctgtcgggatgcgaagagaacattttctgtaccgtcgaggacttcgcgcccttggaaagctcgaccagcttgttcagcgaattgcccatgccgtaggggctgaaaccgttctttacggagaattcgaatccgtattcgtcggcttcgtattcctgcttctgcgagaactgggcgccggtgaatgccgtcacgacctcgccgagctgcgagtcgctcagcttggccagcgtgctgccctcggcggctcctgcggcattgcgcgccgccgatgagaggtaggcgtttttcatcgcgtgttttacgtcggcatgtaccacatggccgatctcatggccgctgatcgccatcagttcgtcgtcgtccatcaggtccatcagggcgctgaatacgcggatcgaaccgtcgccgcaggcgaaggcattgacgtccacgacatggtagaccttgaagttgagcggcagtccgttgatctcggtgatcccctcggtcagccgcttgagacgtgcgccgtattcggtcgtttcgtcggcgatggggttgttggcatccatccattcgaccgcttcgcggctcagctgggcaatgtccttgtcgctcaatgtcacggctttggccacgtcctttcccgcttcgagcagttttccggtgttgagtttcctgccgccgattttcagctgggctgcggcgtcggcgggccacatggcgcacagaagcagggcaaagcccataaagaaaagttttttcatttcaagtatgttttaatcagcgtttgtggttttttcgggacaaatataacgcaattctgctgcggatacaaaaacggaccggaatttccggtccgctttcgttatttgctccagcgcttgagcgtcggaaaatactcccgcatcagcctgacagcctcttcacgggtatagcttttgccgttctcgtcgcggaattcttcgtggaactcggcgcagtgccggatcatctcttccatcgtgcacgcttcggtaaaggcgccgtttttgtagcaatagacgcagtagtccacgctcgcgccgccgtcggcttccgtgccgaagtcgcccgccgtctgcatcggcatgccgcagctctgacagaatttcatctcttcgttcatcgttcaaaggttttatatcctgccggaaccgatgagacgcggttcagagaggatcggtttagtttgttccgggaatgggatcgaatcgcgccggctgaaccccggagaaattatcgcccgaacagttttttcgcgctattcgattttttcatcgtggacgaaatccagtatcgcctgagccgccgcttccggctcttcgaggaatcccatgtgtcccgaattttccagccatacgacctgcgcctgcgggtgctccgcaaccatcttttcggcggcttcgggcggtatgtaaccgtcttttcgaccgagtatgaaaagctgcgggaccttcgacgtgcgcagcatttcgttctggtccctgcgggcgatcatgccgcccagcagggctacgattccctcgtcttcggtgacgaaaacctgctcggtaaggtcttcgatttcgtcccgcatgcgtgcgcggttctcttcggcgaatcctgcggcgggagctacccgtgccagcatctctttcttcccggcctcgacgagcgcgatctccctgcggcggttttcggccttctccggcgtgtcgggattgggcgtggagctgagcagcaccacgccgtcgagcatttcgggatggcgttcgcagaaagccagcgccacgtatccgcccatcgaatgtcctacgagcgtgcagcgtccgatgccgagggctttgagcgcgtcggcgaccgtgtcggccagaaaatccatcgtgtggaccgcgcccgtcaccaccgaaatgccgtggcccggcagatcgagcgtcaccacgcgcacctccttatatagataaggtacgaaatcctcccagacgagcagcgattcgagatagccgtgcagcagcacgacgcatttgtctccggcctgcgagtcgcagacgtgcagggccgtggagccggccataataaatttttcagtcatgattacagggcttactcctcgtcctgatcgtcgaggtagtcgagtacggattcgcgccggggcatgagttcttcctcctcctcttcgtcgatcgaacggtagagcgaatggcgctccttgccgcttttgcgcatcggttcgagacgtttggctttccgaagttcgtccgcttcatgttcgcgaattcccttttgtgttttcatggatgggaaaagatgagtggtttagaaattgtcggtttcgaatacccctttgaagacgcgccgcgcggggcccgtaagccggatatccgtataggtctgcgtgccgggttcatgcgagaagcgtacgtgcagttcgcctccgggcaccgtgattcggtatttggtcgtttcgtgctgcaaagcgtaattggttatgatcgccgcggccgtggctcctgtgccgcaggccagcgtttcgttttcgacgccccgttcgtaggtccgcatccggatttcgccctcgcctgcgatctctgcgaaattgacgttcgtaccctgcggaaaacgcgccgtgtcgtgacggatcatccgtcccagaccctttacgtccacgccgtccagctcctccgtgaattccacatagtggggaacgcccgtattgaggaaccaccagcctttgccgctgcgaatttccgatacatttatcatgcccagctcgatctcgcccgtccggttcttcgcgcggcgtatgcgcgcggtgtgcatgccgtccgtggcgtcgaaatacttggtttcgccgccgatgcccagatgctcggcgaaaagcgcgaaacaccgtgcgccgttgccgcacatttcgcccggcgaaccgtcggcgttgtagtagcgcatcgagcagtccatctcgacgctgcgccgcagggtcatcagcccgtcggctccgatgccgaagtggcggtcgcacaaggccgcgatcagccgtgcgtcggcgctgaacagctcttcgcggtcgtcgatgaggatgaaatcgttgcctgcgccctcgtattttacgaatgataccagcattccggatagtggttatatcatcgcaaaaataataaaacttctaaaagttttactatttttgtggaaaataagcgcattcgcccggaccggcggacgcttgtattgtttttatacagaaccgataaaagaaaaaatccatgaaaagcgtgcttttcaagcatcgttcgatacgtaaattctgttccacacccgttcccgaagagctgctgcaggagatactggcagcggcttcgcgggcttcgacctgcggcaacatgcagctctattcgctggtcgtgacgcgcgatgcggccctgcgcgcgaaactcgccccgtgccatttcaaccagccgatggtgacgcaggcgccttgcgtggtgacggtctgcgccgacgtgcaccgcttctcgatgtggtgcgagcagcgcgacgccgatcccgcatacgacaacttcgcatggttcctgaacgcttcgacggacgccctgcttgcggcccagaacctctgcgtcgaggccgaaatgaacgggctgggcatctgttacctcggtacgacgatctatacggccgggatgatcgccgagatactcgaacttccgaagagggtgattcccgtgacgaccatcgtgctgggctatcccgacgaatcgcccgaactgaccgaccgtctgccgctggaagccgtcgtgcattacgagaaatacaccgactatacggccgccgagatcgacgaattgtgggccgagcgcgaagagtcggagctgaccaagcgtctgctggaggagaacgggctgcctaatctggcgcagattttcacgcagcgccgttatgtgcgtgaggacaacctctccatctcgaattcctacttcgctctgctgaaagagaaggggttctttaacaactgatcgggggcgtgcggggcttgagtcgtatattagctgtcgccgtgctgggctttttgtgctccgcgtgcagcgttacgcgcaagattcccgaagggcagtacctgctgcagaaggtgacgatcgagtccgacaaatcgacgccccgcaaggagcgcatcacggctgccgacctcgaaaaatacgtgcgccagacccccaacaagcgttttctggggacgaatttctatgtctggctctacgagcaggccaatccgggcaagcagaactggtggaacaactggaaacgcaagatcgggcaggaacccgtgctgctcgacatgagcctgaccgagcggagcgcgcagaacctgaaggtctatatggacacgcgcgggttcttctcttcccaagcgacgttcgaagtcgataccacctcgcgccgcaggcgcgccaaagtcgtctaccgcacccggcagggcgagccttaccgcatcgacagcatttcgtacgattttcaggacaagttcctcgaacagatcatcctgcccgacaccgccaatacgctgatccgtccggggcgggttttcgacatcgcggtgctcgaccgcgagcgggagcgcgtcacggctttcctcaaggagcgcggctactacaactttacggtcaacaacatcgactatgtcgccgacacgctcggcggaaaccatcaggtcgatgtgcaggtcaatatcaagcagtatcttacgggttacaacgaacgcggacaggccgtgatggacaacaacatggtctaccgcatcgaccggatcaacgtctttccggcgtacgatccgaccgtcgcgcggaccgattcgacctttctttcgcggctcgatacgctctattaccgcggtctgaatatcatctacgagaagcgtccgaacctgcgtccggccattctgcgtcagtcggtgccgctctatcccaactacgtctacaattcggcgcaggtgaaccgcgcctataccgacctgatgtcgctcggctatttcaagagcgccaagatcgccttcgtcgagcagccccggagcgtcgatgtcaccaattacgtctccttcatcggcgcctcggcggattccacgcagacccgctttacgaaggagggctatctggagtgcaacattttgtgcaccccggcgctcaagcagagtttcaaggtcgatctcgaaggcagtacgacgtcgagtttctacggactgaaggctaccgtcggttaccagaaccgcaacatcttccggggagcggaggcgctggacgtttcgtttacggcgggatacgagtttatgaaggcgcccgacgccaagaaaaagcgcgccacggaattcggcgttaccaccggactcaccttcccgcgttttctggtgccgtggcgtacgcggcggttccgttcggtgaaccagccgaagaccaaggtggagctttcggtcaattttcaggaccgcccctattatcggcgtacgctttcgagtgcgggaatcacctaccagtggaccaacaaccgttactcttcgttctcgctgcggcccgtcgatatcaatgtcgtcgatgtgaatcggctggactcgaccttcctcggcaagacgacgaataaatacctgaaaaacagtttccgcacccagtttatcggcggcctttcgttcggctacagctataacaaccagcgtaagaatctgggcggcaacgccaccaatatccgcttcaatctggagacggcgggcaacctgatcgacgcggtggaccggctgttctatgcgcggccgaaggagggcgagcctgccaaaatcttcggcatcgaatattcgcagtatttccgtacggacctgagcgtcagccgcaagataatgcttggcgaggtgtcggctctcgtggggcgtctctacggcggcgtggcgatggcctatggcaactcgtcggccgtgcccttcgaccggcagttctatgccggcggcagcaacggcatgcgcggctggacgccccgcacgctcggtcaggggtcggtgcccaatccgcacgactctttcccgatacagacgggcgatgtcaagctggaggccaacctcgaactgcgctttccgatctggggcatggtgcacggcgcgaccttcttcgatctgggcaatatctggtatatccggcggaatccttcggagtactccgacgaggcggtcttcttcttcgacaagttttataagcagctgggattcaacaccggactgggtctgcgtttcgacatcaagttcgccgtgctccggctcgactggggcgtgcagctccacaatcccaacaatccggcgggcgaacggtggatccacaacctccgctggaagaataccgcgctcaacttcggcgtcggatatcccttctgacgaggcttcgcgacgacaaaccccggcgcagtgctgcggccggggtttcgtatgcaggagggtgtgcatactgccggatatgcgctgtcatacatgctccgtcggatattcactgccggatatgcctctcctcgacatgcaccgccggatgcgtattgccggacgtgtttcgccggatgctggcccttgtcagttttgcgctttgtactgcgagggcgacatgcccgtgttgcgcttgaagtagctgccgaagaacgactggttcgggaagttcaggtagtaggcgatctcctgtatgctcatcgtcgagtatttgagcagggttttggcctccagaatcacatagttgtcgatccactccgaaaccgactgcccgctgatgcgcttgatgagcgtggtgaggtatttgggcgtgatgcagagctggcgggcgtagaacccgacgctgcgctcttcgcggaagtgttcgcccagcaggtgggtgaattgcttgaagtactcttcggcgcggttgtgcgaattgttctgcccttcgggatgctccgcgaggtagtggtacatgatatccccgaccttgtaaatcgttgcggcgatcagcccgctgacgatatcgaacgagaaatgggtctccggcccgcgggtttcgcgttcgatctgggcgatcatgccgcgcatggagcggctctcttcgggcgtcagcgccaatgtgggattttcgacgaatttgaggaacagcggtatcatgtttttgatgtcgatgttgatgcggcgcatgaagtcgggcgatatggcgatgacgtcggctttgaaatactgttgcgaatttacctgcaggatatttttcggggtaaagatgaacatcgaatccttcttcagccggaattcatgcaggttgaacgatacggaggtctccccttcggtgccgactccgattatgaaggcgtcgatgcggcacgggaaccggaagacctgcatttgggagtcgctgctggccgtaatgcattcgcgcatcaggccctgacgttgttcgccggccaagtctataagttcggccagcgtaaatgagttgatcggtgtttggctctctgtattgttcatttcgtctctggattttggatgaaatatagcgataaaaactcatattcagttcatatagttttatattcggaccaaatgaacagctttgtgcctcttttgatcgccgcttgcggcaggggcatgaaaaaggcgccggaatcgccggcgcctttttcatgccccatcgggaaatcccggagtgacttatttcgaagcagcgggtgcggccgcagcggcgggagcatccgtaatgccgagttctttcttcactgcgggggcgatgtcggtgagggaagcctcgtcgaaataggcgagcgaacccgtcgaagtgtcgaatacggccagatagccgcctgcggcagccactttgtcgatcgcgttcttggccttctcgataatcggggccagcagctcgttctgacgcttctggaagtcctgctgggctgcctgctcgaactcgttgcggcgctgaatcagggcgttgagatcgttctccttgagctggcgtaccgactccgaaagggtgttgaaattcttctggaactcctgcagtttctggttgtattcgacggtcatggactccagattgtcctgaagatccttggcataagcctccatgttggtctgcatctccttcgtttcgggcatccccacgatgatctcctgagtgttgatgcgtccgaatttctgttgtgcgaagagcgatgtcgcgcccatcacgaatacaaccgcaagggttagtttgattgcttttttcataaaagattattagttaattgtttgatgtttctacttcttcagtatgtcgatcaactgctgcgtgcgctccacacagggattcgtatagagcagcgtgggattgttcgccgagtcgagcaccacgtcggcgccggcctgcttggcgtaggcttcgatggccgcgaagaccttcttctggatcggctcgatcatttcgatccgctttttcatcagcgcgccgtcgttgccgaagaggctctcctgaaaggtctgcgcctctttttcgcgggcgagaatggcgttttcgcgggtctggcgggttgtcgccgagagcgaagccttctgattcatataggcgttgtaaagcgcttccacttcagcgaatttggcgtccacctgttcctgatattgcttggcgagttcgtccagatcggagatcgccttgttgtaggccgcgacggatttgaaaaccttttcgctgttgacgattatgtaattctgcgctgccagcgtgccggccgtgagaatgaatgccgcgattaaaatcagacgtttcataatcttatgtttttaagttaatattcagccggtttcccggaaccataccataaatataactattttctttcaaatttattgccagcctctctttttttgcaaacgcctccgccggaattccgggtcccccttttcaaagggagattcgaatacgtggggattgtccgcggaatcgtgcgccggttagaactgctggcccattacgaagtggaactggcttccgctcttgccgctctgacctgccggcgagtcgaagccgtaaccccagtcgatacccagcatacccaccacgggcaggtagagacgtacgccgaaaccggccgaacgcttgatcttgaagggcgagaacttcttccacgaatcgaatgcgttaccgccttcgaggaatcccagcacatagatctgcgacgaaggtttcaggatgacggggtagcggatctcggcggtgtatttgttgtatgccaccgaatagtcgttcgtaggatcgagggcgccgtcttcgtaaccgcgcatcgagatgatgtcgataccgtagatgttgtatcccgacatgccgtcgccgccgacttcgaagcgttcgaaaggcgaaaccttatatttgttgtagttgccgaggtaacccatttcggccttgagcatcagcacgagattcgagttcttggtcagcgcttggaaccactgcgccttgaactgccacttgtggaactcgacccagcggtaacgctcctgatttgctttgtccgccaccttgctgtccgtgctgttggcgagctccgccagcttcttgtagtctttgccgtcccagagcgagtaggggggcgtgaactgcaccgatgcgctgaactccgaaccgcggcgcggatagatcggctggtccaccgagttgcgtgcgaagacgaatttgagcgagagcaggttggcggcgccgttggtcatgccgaacgtattccagtttttgagcgagaagcgttcgtagctcgcctcgccgtaaagcgtgaagtaggggtcgggccagttgagacgcttgcccagacctgccgccagaccgtacgtgcggaagtactgcgtactcttctgccatacgtaataggcgttgttctgctcggagaagtgggccgatatggtgaacgaattgggcttcttgccgcccagccacgggtcggtgaaactcagggcgaacgccttgtagtaggtgccgttggtctgcgccgacagcgacagccgctggttctggcccatcgggtaggggcgccatgcgcccttcttgaagaagttcttgatcgaaaggttgttgagcgtgatgcccaccgaacctacgaacgttcccgaaccccagccgccggcgatgttgaactggtcggaggcctgctcttcgagcggccagttgacgttcaccagctcgttcgaaacgggtttgatgtcgggcatgatcgcttcggggttgaagtgtcccagcgagccgagcgtgcggatggtctgcatgagcagcgaacggtcgtaaagctcgcccggacgggtgtaaagctcgcggcggatcacctcgtcgtccacgcgctggttgcccgtgatgccgacttcgttgatggtgaactgcttgccttcgaataccttgacctcgatgtcgatcgaatccggcccgatgatggtttcggcgggttcgatctgcgacatcaggtagcccttgttctggtagagcgacgatacggacatcgcttcgggatcggtctccttgccgatgcccagacgcttgtgcatcgacttcttgtcgtacgtgtcgcccttgttgacgccgaacatgcgctgcaggtcgtcggtttcgtacaccgagttgccgacccacgacacgttgcggatgtagtatttgttgccttccgaaatgtcgaggtcgatggccagccgcttgtcgctgatcggatagatcgagtcgctgacgatcgtggcgttgcggtagcctttcgagttgtagaagtcgatcagcaggtccttgtcgttctcgtagtcgctctcgttgagtttggtgccgcggaagaagttgatgctcttctggtgcgtcttcttgaaagtccggcgcaggcgcttgtccttgaactgctcgttgcccgtgaagttgatcttgccgatcttgactttgtgtttgcggtcgatcaggaaggttacgttgaccatctgcgggcgcagcgtgtcgttggtgatgcgcgtcgagacctccgtgttgcggaagcccttctcggaccagtaggccttgatgagtttctggttcttgtcgatgacgtaatccgaaagctcgctgccgcgtttgagcttgagcttttcgagcaggtctttcttcttgcccttcgagatgccttcgaagtcccagttgttgacgcgcggccgctctttgaggaacacctccagatcgaggctgtcgccctcgatctcggctccgatcttcacgtccgagaaaaaccgctggctccacagacgcgagatggcgtttgcgatgaagttgctcggcaggtaaatcgaatcgccggggatcagcccggccgaagacttgagaatgtcggggttgaggtactgcacgccgtgaatgttgacgtcgcggatgtaatagagtttctgcgcgccgtcctgccgcaatatgggtgcgtcttccgggaatgcgggcttggccgaagccgcggtgtcagcaggattctgctcttgggcgaatatattcgtgcagcacagcacgagggcagcggctgccgtgaatatcttaccgaaataattcatctatttaaatctaatcttaacttcatctattttaccagcccgaaacggcggtcgcgccgggcgtattcctccattgcacggtcgaactcctcctcggtgaaatcgggccacagcacctccgggaagtagagttcggcgtaggacgcctgccagagcaggaagttgctgagccggtgttcgccgctcgtgcggacgatcaggtccgggttggggtagggcgccgtgtcgagcgccgcgctgatcgtgccttccgaaatctcctccggcgccagctctcccgatgcggcccgtgcggcgatttggcgtacggcgcgggtgatctcgctgcgtgaggagtagttgagcgccagtatcagcgtcagggtcttgcctccggcggtccgctgctcggcttcggccagataacgctgcaccttttccgaaaaacgcgtgcggtcgccgatcatccggatctccaccccctgacggatcagttcgggcgtttcgttgaccacgcttttgcagaaaagttccatcagcgcatcgacctcctgcgcgggacgtccccagttttcggttgagaacgcatagagcgtcaggtacttcacaccccagcgcgcggcggcgcgcagcgacgcccgtacgggttcgacgccggcgacatggccttcgtaacgctctttgccgcgcaactcggcccagcggccgttgccgtccatgatgatggcgacgtgttgcggtatgcgattctgctcgctcatattagggcacaaatatagggaataaaaatgaaaaatacctattaaatgaacaactttacaccgtttttgtgcagggcattaactgcggatgtcgatgccccacatcattttattccgtaacgtgtcgtaaaatgatatattgtgcggtacggccaaaaaaatcttctgttcggcgcgtttgacggtgaatgtcgcctcctgcccgacggcatagacgcggttgtccagagtgacgaatgcgtccgagcggcgcgtgtgtacgtgaagcgtgatgacggcggtgtcgggaatgaccacggggcgcatcgtcaggttgtgcggcgccagcggcgagatcaccagacaggcgcacgtcggggctacgaccgggccgcccgcgctgagcgagtaggccgtcgagccggtcggcgtcgagaagatgacgccgtcgccgtggtaggtggcgaccatctggtcgtccacgtaggtttcgaccgagatcatgcctgcgccgtggcgctgtacggtgaattcgttgagcgccagcgtggtgtcgggctgctcggcgtaatcgcccgtgacttcgatcatcgagcgggcctcggtggtgagacgcccctccgcgatctccttgaagatcaggttcaggccggcggacggggcgctggtcaggaagcccagatgcccggcgttgatgcccatgacgggaatcggtgcgccgcagagacggtgcacgccttcgagcagcgtgccgtcgccgccgtagcagaccatcaccgaattggcaggctgtttgcccgtgcattgtccgtagatcttttccggcggaatgcggatgcccgtaagctcttcggccagaggcgcgaactcctcgttgacggcgtagtcgaatccgaaaatgcggaaggcttcgaacagctggcagatctccccggcggtgtgaggcagctggcggcgggaaaaaagtatgattttcatcggcggagtttcgaaaaaataagtaactttaccacgccaagacgatacaggaagccggttcgtgcctcgtccggatcgcccggcgcaacttggttcaacatcggggacggcgcagtccgcattccggcttcatccggcagcggccgcagacgggtcccgaatgcaaatatagcgaattttatgacaaagttgagtgtaaacatcaataagattgccgtggtgcgcaattcgcgcggcggaaatcttcccgacgtggtccgtgcggccctcgatatcgagcgtttcggcgcggaaggcatcacggtccatccgcgtcccgacgcccgccacatccgctacgaggacgtgcggaacctgaaacgggtcctcgccaccgaattcaatatcgagggcaatccgattccgagcttcgtcgatctggtgctggaggtcgtgccgacgcaggtgaccctcgtgcccgacgcccacgacgccattacgtcgaacgccgggtgggacacgctcgccaaccgcggattcctgaccgaagtcacggcgcggttccatgagaaaggcatccgggtctcggttttcgttgatcccgatccggcgatggtcgccggggcgaaggcctgcggcgccgaccgcgtggagctttataccgaggcctacgcccgcgaataccccgccggcgccgaagccgcgctggcgccctatctcgcggcggccgaggaggcccgccgtcagggactcggcctgaatgccggacacgacctcaatctcgaaaacctgcgctttttcgtcagccgcatcccgtggaccgacgaagtctcgatcggccacgcgctgatctgcgacgcgctctattacgggctggaaaacacggtccagctttacaaacgcgaactccgataaatagaaaatgataaaaagaagccgaccatgaaaaaaatcgttctccttgccgcggcgcttctccttgctgccgcatcgttcgcccagagcgaatacaactaccagaaacgcagtcttttcgagcagttgccgattcgcggcaacgacatcgttttcctcggcaacagcatcaccgacggcggcgagtgggccgagttgttcaacaaccgccatgtcaagaaccgcggcatcagcgccgaccgttccggctggctgctcgaccggctcgatccgatcatcaacggccatcccaaaaagctgttcctgatgatcggcacaaacgatctggccgtcggcatcgcgcccgaagaggtcgccgccaatgtcgaaaaactgctcgaccgtttcgccgaggagtcgccgtggacgaagatctacgtgcagagcatccttcccgtaaacggcgtggatacgaaggccaagccgaagaaccactggaagaagggcgccgagatcatcgagaccaacaagctgctcgaaacgctttgcgaagggcgcaagaacgtgatgtatgtcgacgtctattccgcgttggtcgatgagaagggcatgctcgacaagcagtacaccaacgacggcctgcacctgatgggcgagggctatctggcgtggaagacggtgatcgaaaaattcgtgaggtagccgcgtgccgctgacgaatcccatattccggcgaatctcgcgtctggccgaggagcagggcgtgagggctttcgtcgtaggcggttacgtgcgcgaccatttcctgcgccgcccctcgaccgacatcgacgtggtggtcgtgggcagcggtatcgcgctggccgaagcgctgggcagcgaactgcacgccaaggtctcggtattcaagaccttcggcacggccatgctccgccacaagggcgtcgaggtcgagttcgtgggcgcccgccgtgagtcctatacgcaggattcgcgcaaaccgcaggtcgaggcgggcacgctcgaagacgaccagcgccgccgcgacttcacgatcaacgccatggcgtggtcgctcaacgccggttcgttcggcgagctggtcgacccgttcgacggcatggacgacctcgaagagtgcgtcatccgcacgccgtgcgatcccgacgttaccttctcggacgacccgctgcgcatgatgcgggccgtgcgcttcgcgtcgcagttggggttcacgatcgaaggcgagaccttcgacgccatccgccgcaatgcgcaccgcatccggatcgtgtcgcgcgaacgcatcgctgcggaacttaacaagatcgtcctttcgcccgtaccctcgatgggcttcgaactgctggagctgacggggcttctggagctgattttcccggagatgcacaacctcaagggcgtcgagaagcggggcgcgcatgcccataaggacaattttatccatacgctcaaggtgctggacaacgtcgcccgccgcagcggcgatctgtggctgcgctgggccgccgtgctgcacgacatcgccaagccgctgacgaaggcttacgatcccaaggtcggctggacgttccacggccacgaggtcctcggctcgaagatggtgccggcgatcttccggcagttgaagctgccgctcaacgagcatatgaaattcgtgcagaagctggttttcctccacctgcggccgatcatcctctccgaagatctggtcacggactcggccgtgcggcgtctgctgttcgaggcgggcgacgacgtggagcagctgatgatcctgtgcgaagccgacatcacttcgggcatcgacgccaaggtcaaacgctatctggccaatttcgagctggtgcgccgcaagatgaaggatttggaggagcgcgaccgcatccgcaacttccagccgccgatcacgggcgagatcatcatgcagacctacggcatcggtccctgccgtgccatcggcgacatcaaggaggtgatcaagaacgccattctcgacggcgaaattcccaacgattacgacgcggcctacgccctgatggagcggctggcggcggagaagggattgaccaaagccgcggttcagaacctctgaaaacggtcttgtccgttcagggcgtatttgtaaatcaaaaggttgagttgcagatactcaaccttttttcatgcccgcttccgcctccacctgcgcccgcgatttggatttggtcaccagccagaccccggcgaagacgcacagggccgctgcggccttggtgaacccgaaggagtcgagaccgattgcaaccgagaaaagcaccgccacgacgggttgtacgtagttgtacatcgacaccaccgtgggccgcaggtaacgctgtccgatcggcaccatgaagtaggagaggaaggtcgagcagacgaccacgtagccgattccggcccatgtccggggcgcgagcgcggcgtagtccaccgccgtgagcggccggtaatagaccgcggcagcgacgacggccgcgaagaggaacatccacttcatggtcgttacgggcgaatatttgacgattacgttgcggaaagcggtgaggtaggtggcgtagctgaccgcgctgacgagacacaatacgtcgcccttgacgctgctcgtgtgccccgtcccgtgccggctgaccagaatcagcagcagcgccccggcgcagccgaggaacacgccgcccgccttgagccatgtgatcggctcgcgcaggaacagcgtcgccagcaccatcgtcagtacggggaccaccgtggcgatgatcgacgagtcgatgggcgaggtgagcgacagcccccagaggaaaagcatctggttgagctggatgccgaacaccgacgcgaagagcagcagcacgatgtcgcgccgtgcgactctctcgcggggcaggaaaaacgaaacgctccagaatagcaggcaggcgcccagcatgcggtagacgctcagtgcgaacggactgaccccgccgggattgctctccgaccagagcacgctcttgccgatcggcgcgttgaggccccagacgagatttgcgacccagagagccgcgtggcctttcagttttcctttgtccatgtcattgcgggattgacgcggcaaatataggtaaaatttggtgtaataattgcccctcggaattcccgtgagcaaaacgcgttacaatatcgatctggtatttgccaacctctttttcggagcgaacttttcgttctatgtctcccttacgcgcaattatctggacttccagcagatattcatgcttcaggtcctttcggcggcggtgttcttcattcccttcgcgctcttctcgaagcagtcgttccgcatccgctggcgcgacgcgggcaatatcctgatcgtcacgatgctgattgtctacggctggatgtacatgctgttgtggggatcgtcctacacctcgcccatcgacgcttcgatcatctcgaccctcggtcccgccgtgacgctgatcacggaccacctgatgcacccgcacaaatacatcagggcgcgggtcgtgggcgtcgtctgcgccctgatcggcgccgccgtcctgctcttcgaccacgggttcgtgctcacccacggcagccgcgcctacggcaatgcgctggtactggttgccgtggtggcgatcgccatcaatacggtgattatcaaaccccagctcgaacggctgggaacgctggtggtgatggggtggtactacatcatcggattggccgtgacggcgccattcttctggaaatacatcgcccatacgcagttcctgaaactgccccttcaggcgcaggccgaactggcctatatcctgattctgggcacggtcctgcccatgtacctgctgtaccggggtacggagaaactcacctcggtccatacggcgctctaccgctatatccagccggtgaccgccggaattctggccatcgtccgcggtcaggccgtcttcgacacggccaacgtcgtggcccttgtcttcatcttcgcaggcgtggtgctggtggtgatcggctataagtattacgtccgccacggactgccgcccgtgggcagcgacgggaaactgcgggcctagtccgccagcaggcgttcgcgccacgcatcgggcacgggcatgctttgctgccgcgagaagtcgaatgcgaccatcaccgagcggctctcgctgcacacccggtcgccggcgagcagccgctggaagagcgtgaggcttttgttgccgatcttctcgcaggtggtcgtgacgcgcaccctgtcgtgcaggcggatctgatctatgtacgaggtcgaagtggagacggtgacgatgcgcagatcgccgagcagcacctcgtcgccgagtatcttttcgtaatactccatttttcccacgtcgaaatacatctgctgcgagacgttgttcacatgctggaacggatcgacgtccgagaagcgcttctggatggaggtttccaacgtttttgccatgtgtgttattcgcgtatgattttcacttcgccgccctcgccgaaggcgatgatcgacgacgcctttttcgtgggcttgccctcgaagcggggattgacgacgaaatcgacgccgtcgatgatctcgcgcgacacttcggcgagtcctgcgggcgtcgcctcgcccgaaatgttggccgaggtcgagaccacgggccgccccagcccccgcagtatccggcggcagaattcgtggtcgggaatccgcacgccgagcgtccgctcttcgggaatcaggttctcggcgacgccggccgctcccggaaggatcgccgtcagcgggctggtcgccagctccatgacctcgaacgcgatgccgggagccttgtttacgtagcgcacgaccatgtcggccgacgcgcacagcatgagcatcgacttcttgttttcgctccgtttgagtttgtagatgcgctccacggcttcggcgttggtcgcgtcgcagcccagcccccagaccgtgtcggtggggtagaggatgatgcctcccgctttcatcacgcggaccgcctcatcggcctcccgctgcaattcggtgttgttttgcataggtgtttgttttgacgcgccgccgcccttcgggccgcatgcgctgcggttttgcgccgtttcgcgcgccgcggcttcggccggcggcgcgtgaatgacgccgtatgggtattccgcttattttacgggcagcacctcgatccagtagtcgtcgggatcgctgatgaaataaagccccatgtcgtgattctcgtaacagatgcagcccatggcgcggtggtattcgcggacggcgtcgtaatcgcccgccacgcgcatgcagagatggctctcgttttcgcccagttcataggcgccggcgtggtcgcgcagccatgtcagttcgaggcggaatcccgtctccccgtcgcccagataaaccagtatgaagcttccgtcgcccgcttccttgcggcctgtttctttcaggcccagcgccttgtcgtaaaattggagactgcgtccgaggtcggtgacgttgatgttgaaatggtcgaatctgcttttgatttccataattaccggatttagtgctgcgcaaaattacacaaatatcccaaaatccgcatacgcgccgcgcataataaattttggccgtaattcttaatttttaattcttaattttatacctttgcaccacgaacgaaaaataataacgaaaaattcatatgggaagagcttttgagtatcgcaaagcgcgtaaaatgaagcgttggggacatatggcccgcacgttcaccaaactgggaaaagagatcgagatcgcggtcaaggccgccggacccgatccttcgggcaacacccgtctgcgtattctgatgcagaatgccaaggccgagaacatgcccaaggagaacgtcgaacgcgccatcaagcgcgccaccgagaaagatgccgccgattacaaggaggtcatctacgaaggatacggctcgcacggcatcgcattcctcgtggagaccgcgaccgacaacaccaaccgcaccgtggccaacgtgcgcatgtatttcaacaaatgcggcggtacgctgggcaacagcggcagcgtggcgttcatgttcgaccacaagtgcgtcttcaagttccgcccggccgaaggcgtcgatatggaggagctcgaactggagatgatcgatctgggtgtggacgagttctatcccgaagaggacggcgttacggtttacgccccctacgagtcgttcggcgccattcagaaatggcttgacgacaaggggtacgagatcgtgtcgggagagtcggtttacctgcccaccgatacgaaggaactggacgccgaaggccgcgagtcgatcgagaaactcgtcgagaaactcgaagaggacgacgacgtgaccaacgtttaccacaacatgaaggaggtcgaggaggagtagtttcccgcctcaggacgatacggtccgccccgaacggcaagcccgtccggggcggattttgttttgcggccgtttgtccttatctttatattcctgaaaggggcgcccgtaataattgtagcttatgattcgtgccgatttacatattcattcgcaatacagcagcgacggagagttccgtcccgccgacatcgtcggcaaatgcgccgccgggggcgttgacctcttcgccttgacggaccataacaccgtgcgggggctggacgaagcctgcgacggggctttgcacgccggattggagtttgtgccgggtatcgagatcgattgcagcttcgagggtacggacctgcatctgctgggctatggcatcgactggaagtctcccgatttccgtgcgctggaagagaccgtcgccgccaaggtcatggcgtcgttcggcgagacggtcgggaagctccgtcggctgggcttcgccgtcgatgagcaggccgtgctggccgccgcggcgggcaaactgccgacgatggagctgatcgccgaagtgatgctctccgacgccgcgtgcgatacgccgctgctggctccctaccgggagggcggcgtgcgcggagatatgccctatatcaacttttacctcgacttcggcgcgcagggcaggcccgctttcgtcccgatggaatatatgaacttccgcgacgccgtcgagctggttcgcgacaacgggggcgtgccggtggtcgcgcatcccggactcaatctgcggggccgggagcgtatcgtcgagaagttgctggagcgcggggccgagggattggaagttttcaataattaccacgatgatcggcagatcgcctatttcgcgccgctggtccggcgccgtggggccttgatgacctgcggcagcgatttccacggcaaaaccaagcccctgatccatgtcgggcggttcggatgcgacgcgcgctgggaatcctctcttgccgattcggtcgcgcggctcgcgaaaggcgtgtgaaaatccggattcggtggcgcgtcaatcttcgaacgcgacgaacctccgcccgtcggtcaggcagcaggggcagtaggaatcgctgcaccccgccggatagatgttgccgcaggtcggacagaccagatagcctttcggggcgttgtctgccgtagcgtccggccgactgttttccgaaccttctgctgttccgcgtcctgaagcgcgggccgtcccgttcgccggggcgcctgccgtgccattatttgccctcctgccggcgatgttgccctgtgtgcccgcaggtctgttggccgccagccggcggcggcaggtctccatcagcgccagatgccgcatgtccccggacctcgcccagatcagcacgcgggccgcatagcggttgccgctttgcagggcgcgctcgatgtcgtctgcatgcagcccctccggcggacggcgtgcgaagtcgatgctccggcgcaggttgtcgtcggtcgtgccgtggaagacggtgactcgctccggcggtgcgtagcggccgccgagccggacgatggcgttggcgcagttgtactcctgaagtcgctcggcgtgggccatggcccggaacagccgttcggcgtcgtgctcccgctcttgccgggcgatgcccgcgaaatggtcgtactgtgccgatttgacgtgcttgcggcggctgcatgcgtcgaggtccgacagcacgccggcccatttgtcctgccgtgtcgtcgttccctcgcgcgtcgcggcgtagtacatccctgcgaggatgactgccgatgccgcgaacagcagcagaaccaataacggacgtcctttcataatcatatcgacggtggaataaatttccggaagcattttttgtgccaacgggaagctgtttttcatggacggccccggtagattcgggcaaaataaaaaggcggagtccggagactccgccttcttgccttatgtgcgactgttacagccgtgccttgatggctttcgaagcctcttcgtagccgggtttgtccagcagggcgaacatattcttcttgtacgcctccacgccgggctggtcgaacggattgacgccgaggatgtagccgctgatgccgcaggcgcgctcgaagaagtagagcagcgagccgacggcatgcgcgtcgatctgcggaatctcgatgcggatgttcgggacgccgccgtccacgtgggccagctgcacgcccagctcggccatgcggtttatctccgaaatgcgcttgcctgcgaggaagttgaggccgtcgagattctctccgtcggcttcgacgactaccttgccggcgggttcggcgaccgaaatgatcgtttcgaacagcgtgcgttcgccgtcctgaatatactgtcccatcgagtgcaggtcggccgtcagcgtcacgctggccgggaagatgcccttgccgtccttgccttcgctctcgccgtagagctgtttccaccactcgttgatgtattggagcttcggctcgtaggagccgagaatctcgatcttcttgccgccttcgtacagctcgttgcgcacggctgcgtaaactgccgccgggttcttttcgaacggcgtgccgtcggccgtcgcgcgctccatctcctgcgcgccgcgcaccagtgcggcgatgtccacgccggcggccgccagcggcagcaggcccacgggagtcagcaccgagaagcgtccgcccacgtcgtcgggaatgacgaacgtcgggtagccctcgttgtcggcgagcgtcttcagcgcgccgcgcgccttgtcggtgatggccacgatgcgctcggcggcttcctgcttgccgtaacgcttttcgatctcggctttgatcaggcggaaggcgatggccggttcggtcgtggttcccgacttggagatgacgatcgtggcgatcgagtactccttcacggcttcgagcagttcgtgggtgtaatcctccgagatgttctggcctgcgaacaccacgacgggttccgttcgcttcttgtgcaggaacttgaacgaatcgctcatggcttcgagcacggccttggcgcccagatacgagccgccgatgccgatgcagatgatcacttcggccttctcgcggagcttcgcggcctgcttctcgatggcttcgatccggtcgggcgtgatcgacgagggcaggtgcacccagccgaggaagtcgctgccggcgcccttgcccgattcgagcagggcgttggccgcctgcgccttggcctgcattgcggccgaaaccgtaacgcccgttttggagatgtctaatttcagagtttccatgttattgtcaaattaatttggatgtcagttctttcatgcacttgcgcgccgaagccccttggtagagcacgttgtaaaccatttcggcgatcggcatttcgatcttgtggcgggcgttgatgtgacggatgcagtcggcggcgaagtagccttcggcgaccatcgtcatttcgttgagggcgcttttgaccgtgcagccgtggccgatgagcagtcccagccgccggttgcggctgtagaccgagtagcaggtcaccagcagatcgcccagatagcccgacaccagcgtgtcgcgctcggccggatagctctcttccagaaaacggcgcatctctccggcgctgttggcgatcagcaccgcgaggaagttgtcgccgtaacccagcccgacggcgatgccgaccgagagggcgtagatgtttttcaggatggcggcgtactcgatgccgtacaggtcggtcgagtagctcaggtgaatgtagtccgtggcgaatttctcgcccagcatctgggcgttctccgggtcggtgcagaccaccgtgaggtaggagagcttgccgcgcgagacctcctcggcgtgcgacgggccggtgatgatgccgatctgtttgtacgacaggtcgtagcggtcgtgaacgtattcgacgatggtcttgtagtcgccgggaacgatgcccttgatggccgagacgacgaatttgtcctgcagcgagaccgtcagcggttcgaggaacgtcttgaggtaggccgacggagtggccagaatgacgatgtcggcttcgcggaccacctcgtcgaggtcgtcggagggggcgatgcgccggcggtcgaactccacgtcgctcagatagcgggggttgcggccttcgccgagcagtccttctagcacttcgggattgcggacgtaccagcctacgcgggcttcgttcgcggcgagcagccccacgatggccgtcgcccagctgccgtagccgatcacggcgcagcgggcctcttttccgattttgtattccatgtaaggatcgattgtttcggtctacaaatgtaatcaaaaaaaataataaaaaaatgtaaaaatatccctcgctttttgttacctttgtccggatatgtcgccttacggcggaagccccggcgggaggttaggccgggcgagatacagaacgttgattataaaataattaaggaaatataacagttgggtgtagcactatgggaattttttcactgacacaggagctggccatcgacctcggtacggccaacacgctgataatctacaacggcaaggtcgtggtcgatgaaccgtcgatcgtggcgctcgacgtgcatacgggcaaggtcgtggccatcggccatcaggcgcgccagatgcacgagaagaccaaccctaacatcaagacgatccggccgctgaaggacggcgtgatcgccgatttcaacgccacggagctgatgctgcgcggcatgatcaagaaagtcaagacttcgggcagtctcttcgccccctcgctgcgtatggtgatctgcattccgtcgggttcgaccaacgtcgaaatccgcgccgtgcgcgactccgccgagcatgccggcggccgcgaggtctacatgatctacgagccgatggccgcggcgctgggcgccggtctcgacgtcgaggctccggaaggcaacatggtcatcgacatcggcggcggcacgtcggagatcgcctgcatctcgctgggcggcatcgtctgctccgagtcgatcaacaccgccggcgacgtcttcaccaacgacattcagagctacgtgcgccagcagcacaatatccgtatcggcgaacgtacggccgaagccatcaagtgttcgatcggtgcggccgtctccgatctggacgaggagcccgaagacttcgtggtgacgggtcccaacatgctgacggccctgccccagaccgtgtcgctcagctacagcgagatcgcctatgcgctcgaaaagtcgctcacgaagatcgacgccgcactgatgaaggtgctcgaatcgatgccgcccgaactgtatgccgacatcgtgaagaacggcatctatctggccggcggcggcgccctgatcaaggggctggaccggcgcctgaacgagaaaaccggcatcccgttccacatcgccgaagaccctctgcgcgccattgcgcgcggtacgggcatcgcgctgaagaacatcaaccgcttctcgttcttaatgaaatagttgtaacgcactccggccgggccggaggtgagaggtgaataaatgaatacggattgcgggcatagtgtccgcaatcttaaattaacgagaaaccgtgcgcaagctcttagagtttatccgaagcatctatgtcatggtgctcttcgtcgtgctcgaagcgatagccgtcagctattacgcccactcgacctactacacgcaggcccggctgctggcgcgttcgaatcaggtggtcggcggcgtgcacggcatgttcgcgggcatccggcattacttttcgctcggacgcgagaaccgcgacctgctcgcgcacgtggccgagatgaaagagcggctggccgtgtacgaggaggccgagaccgccgcgcggctggacagctacatgcaggacgtcggaatctcgaaataccgcgtcatcaccgcctcggtggcttcgaatacggtcaaccgtgcgcagaacctcgtcgttctcaaccgcggccgccgcgacggagtggccgaggagatggcgctgctggcgtccgacggctcgatggcgggctatgtggtcgattgcacggaacgctattcggtggcgatgtcggtgctcaacacttcgttccgcgccagcggcaagttggtgggctccgattatttcggttcgatctactgggacggcgccgaccctcacaccgtggtgctggacgaactgtcgaagtacgccgatccgcagcccggacaagaggtcgtgaccacgggcttctcgcagtattttcccgccgacgtgctgatcggctgggttgaaagcgccgagctgaacgaaacccgcacggctttcaaggtgcgcgtgcggctggcggccgaaatgtcgcgcctgacggatgtgattctggtcgagaaccgcgacctgaccgaaatccgcgatttgcagaacagtgaaaaagtagaacaacatacccggctgaactaaatgcacagaacgcttccatacatttcgctcttcgtcgtgacggtgcttttgcaggtctttctgttcgacaacctgtcgatcagcatctacctcaatccgctcgtctacgtggcgttcgtcgccctgctgccgctggatacgccgcccgtggtgctgctcgcatcgggactggccatgggcgtgacgatggatttcgccatgggagccgcgggcgtgaacaccattgccacgctgcttgtcgccttcgtgcgtccggcgctcctgcggacgctgtatacccgtgacgatctccgcgaaggcggcgtcccctgcgccgggcggctcggacggcgcgtattcctgaattacctgatcgtgctggtgctcctgcaccatgccgtattcttctcgcttgaggccctttcgtggatgcacctcgtgcgtacattggtgcgtatcgtcgtcagcggcgccgtgtcggtggcctttatctggattatcgcccgtattttcaccgcaaaacttcccgtgcgcgtatgagagattccgaaggtttcgtccggatgcgcaccctgcagtgcgtggtgctcttcgtcttcctgctgatcgggggccgtctggcctatatccagcttatcgactcgcgctacaacgaactggccaaagccaacgtgctgcgccatgtggtgcagtatccgccgcgcggcgaagtcttcgaccgcaacggggagtatctggtccagagccgcgagtgctatgacctgatggtgatctacagcgagatcgacaagaagggcttcgacaccctgcgcatgtgcgaggtgctgggcctttcgcgcgaaaagctcgaaaaggagcttgccaatgcccggatgcgcccccgtgcgccccgcgtggtgacgagctatatctccaaggaagacaagctgcgtttcgacgaatgcaacttccggggattctatgccgtctaccgtacggtccgccgttatccccgcaaggtgggcggcaacctgctgggattcgtgggcgaggtgaacgccgatttcctgaagcgccacccggactataagtccggcgattacgtgggtatgagcggcgtggagtcggcttacgaacccctgctgaaaggccggaaaggcgtgaagattcaggagatcgacacccacggggcgatcaagggttcctatatgaacggcgtttacgactcgctgcccgaaccggggcgctacctcgtcagcacgatcgacgcccgcctgcagctgctgggcgaggagctgatgcgcggcaaggtcggggcggccgtggcgatcgaaccttcgacgggcgagatactgatgatggtctcctcgccgacgtacgatcccgacgaactggtcggccgggagcgcggcaacaactacatgaagatgatctacaacaagcggcatccgcttttcagccgtgccgtgaaggccaaatacccgccgggatcgaccttcaagctcgtgcagggcctgatcgggctgcaggagggcgtgctcaggccctcggacctgcacgtctgccacgaaggctatcaggtcggccgccggcgcatgaaatgccatgcccacgcttcgccgctggacctgcgcttcgccgtggcgacctcgtgcaacgcctatttctgctatgtcttccgcgacattctcgacaaccgcaaatacgagagcgtgaaagacggttacgacgtctggaaagagtatgtcgagagtttcggtttcggccgcaaactcggctccgacttcctcgacgagggcaacggctacgtgcccgaccgctcgtactacgaccgccagtacaggggttcgtggaattcgctgacggtcatttcgctggccatcggtcaggatgcgctgggctgtacgcccttgcagctggccaatctcgcggccatcgtcgccaaccggggctactactacattccgcatatcgtcaagaagatcgaggggcaggattcgctcgaccgccgtttttacgaacgccactataccaaggtcgatcccaagcacttcgaaccgatcgtcgacggcatgtggcggggcgtcaacgtcggcggcacctccacggcggcgcgtctggaaggactcgacgtctgcggcaagaccggtacggccgagaatccccgcggccgcgaccactcgaccttcctctcgttcgcgcccaaggacaatccgaagatcgccatttcggtctatgtcgaaaacggcggtttcggcgcttcggcggccctgccgatcgccagtctgctggaggagtactacctgaccgacacgatccgccgtccggccctgctggagcatatcaagaatatgaacatctattacccttcgtatgaccgctaaccgccatagtatcttttacggagtggacctctggacggtcctgctgtacgtgctgatcgtgctggcggggtgggtgtcgatcacctcggcgtcgtacgacgagggcacggccgatatcttctccttctcgcacttctacatgaagcagctgatgtggatcggcgtggcgtggaccacggcgctcgtggtgctgctgctcgacgaacggttctaccatatgttcgcctatccggcctatttcgcgggattggcgctgttgctgggcgcgctgttgttcggccgcgaggtgaacggtgccaaggcgtggttcgaattcggttcgttccgcctgcagcccgtcgaattcgtgaagatcgccacggctctcgcgctggcccgcgtgatgagcgcctactccttctcgatcaaccgtccgggcgatctcttcaaggtgggcgtggtgatctgcatcccgcttttcatcatcatcctgcagaacgacaccggttcgggcatcgtactgggctcgttcctcttcgtgctttaccgtgagggactcaacaagtggctctgcatcccggtgctgctgatcgccgcgctgttcatcgtgtcgttcctgctttcgcccatgacgctgctcgtgtcgatcattctggtctgcacgctctccgaagcgatgatgaccggggagtggcgctcgcgcctgatctatctggcgtcgctggcgctggcgagcatcctgctctgcatgacgatggcgctcgtcgcgcccggcgtgatggacctgcacgcctgcctgctgaccgtgacgctgctgtcgctggtcggcgtgctcgtctatgccttccgcatgaacctgagcagcaccctgattaccgtggggctttttctctgcacgatgatcttcctccccaccaccgactatatcttcaattcgattctcaaacagcaccagcgcgaccgcatcctgagttttctgggcatcatcagcgatcccctcggcacggactacaacgtcaatcagtcgaaaatcgccatcggttcgggcgggttctggggcaagggattcctcgaaggcacgcagatcaagtacggcttcgtgcccgaacggcataccgacttcatcttctgtacggtaggcgaagagtggggctttctggggacgatggtcgtgctggccctgctctgcatgctgatcctgcgcctgatgcgcatgggcgaacggcagcaggagcctttcggccggatttactgctactgcgtggccgcgatcctgttgttccacgtgctggtgaacgtgggcatgaccatcggcctgatgcctgtgatgggcattccgttgccgttcatgagctatggcggttcgtcgcttattgcgtttaccattttgttgttcatcgccgtgcggctcgacgcttcgacgcggcagttttccctgaattaaatactgcataccaatgatccgttacaatcccaaaggtttatcctcgcaagaggccgcagacagccggcggacgcatggcgacaacgtcatcacgccgcccaaagacgattcggcatggaagcttttcgtcgagaagttcaaggacccgatcatccgcattctgctgctggccgcggtgctgtcgcttgccatcgggtccgttcacaaggatttcaccgagtcgatcggcatcatatgcgccattattctggcgacctgcgtcgggttctggttcgagtgggacgccatgcggcgtttccgccggctgaatcaggtcaacgacgatattccggtcaaggtgatgcgcgacggctcgatccgcgagattccccgccgcgacgtggtcgtgggcgacgtggtctatatcgaaagcggcgaaaccgtgcccgcggacggcgagctggtcgaagctgtgtcgctgcgcatcaacgaatcgaccctcacgggcgaactggaggtggataaaaccgtcgacgaggcgcatttcgattccgaagcgacctatccttcgaacgtcgcactgcgcggtacgaccgtggcggacggttacggcgttctggttgcgacggccgtgggtgatgcgaccgaagcgggccgcgtcacggagcaggcgaccgtccagagcgacgagcagacgccgctcaaccgccagctgacgcgcctctcgaaactcatcggccgggccggcattgcgcttgcggtcgctattttctgcgtcatgctcggcaaggcggtcttcgtcgggagcttgttcgagcgcgactggctcgaaatatcgcagcaggtgctgcacattttcatggtctcggtggccatcatcgtgatggccgttcccgaaggacttccgatgagcattacgctgtcgctggcgatgtccatgcggcgcatgctcaagaccaacaacctcgtgcggcgcatgcacgcctgcgaaacgatgggcgccgtgacggtcatctgcaccgacaagaccggcacgttgacccagaaccggatgcacgtgcaggaactggtgcgttacgatgcgcttccggcgcatgatttcgccgagatcgtggccgccaactccacggctttcctcgacgcttcgggcgccgttataggcaacccgaccgagggcgccctgctggagtggatgcgctcgcagggcgaggattacgaacccctgcgctcggaggcgaagatcgtcgaccggcttaccttctcgaccgaacgcaaatatatggcgacgatcatcgaaagcggcgtttcgggccgccggatcgtctgcgtcaagggtgcgcccgaaatcgtgcgcgccatgtgcgctcccgacggcaaggatacgcaggtcgccgagcagctggccgggtttcagggccgcgcgatgcgtacgctcgccgtggcgtgggccgaaaccgccgaggacgactgtctgcgtgccgtagcggcgtcgcagctgcatttttcgggtgtggcggctatctccgatccggtgcgcgaggatgtccccgacgccgtgcggcgctgcttgaacgccgggatagacgtcaagatcgtcacgggcgacactcccgctacggcgcgcgagatcgcccgccagatcggcttgtgggacgacgcccgcgacaacgaccgcaactacatgaccggtacggagttcgcggcgatgagcgacgatgagctgctcggacgcgtgcgggaactgaagatcatgtcgcgcgcccggccgctcgacaaacagcggctcgtgcgtctgttgcagcagtgcggcgaggtggtggccgtgacgggcgacggtacgaacgacgccccggcgctcaacttcgccaacgtggggctttcgatgggatcgggcacctccgttgccaaggacgccagcgacatcacgctgctcgacgattcgttcgcttcgatcgcgacggccgtcatgtggggccgctcgctttaccgcaacatccagcgtttcgtacttttccagctgacgatcaacttcgcggcgatcgtgatctgcttcgtcggcgcggttttcggcaccgacatgccgctgacggtggtgcagattctctgggtcaatatcatcatggacacctttgcggcgatggcgatggcctcgctgccgcccaatcccgaagtgatgctcgaaaaaccccgtccgcgcgacgagttcatcattacgcccggcatggcccgcacgctcttcatctgcggcggcatcatggtcgccgtcctgctgggcatgctcttctggtggacgatcaccgcaggcggactcaccgtgcgccagctgacgcttttcttctcgacgttcgttttcctgcagttctggaacatgttcaacgccaaaggcttcgagacgcgccattcggtctttacctgcctgcgcgggtgccgtgagtttttcctcatcctgctggccatcgccgcgggacaggtgctcatcgtcgagttcggcggcgaggtgttccgcaccgagccgcttgcgtggcgcgaatgggcggccgtcatcggctgcacctcgctgctggctatcggcggcgaagcgattcgtgccctgcggcgaaaacgttgaacgactggctctggatgaagagatcttttttgctttgtctgtcggcggtgttcctgatttccggtcctgtctcggcgcagattaaagacagtctgggcaacgagtgtctgatccctgcggcggaaagttctttctcgcagtatgtggaccgccggacttcgaccaaaggttaccgcatgaccttcgtcgccgtgccgctgattctgggcggagccgtggtgtcgctttacgataccgacttccgccgtctgcgcaacggttacgtcaggtcgttccaccacgattacgacgattacctgcaatatgcgcccgcagccctgctggtcgggatgaaggtctgcggcatcgaaagccgcagctcgtggggacgcatgctggtctccgacgctttctccgccgggctgatggccgcggcggtcaattcgctgaagtactccttccgcgtgatgcgtcccgatggctccacgcgcaattcgttcccttccggccatacggcgaccgcctttatgacggcgacgatgctgcataaggaatacgggcaccgcagtccgtggtacagcatcggcggctatacgctggcgaccctcacgggcgttacgcggcaactgaacaaccgccactggatgagcgacgtcatggtaggcgcgggtatcggcatcctcgccaccgaattcggctatttcctcgccgacctgatattcaaggagaaggggcttaaggtccgcgaaacatacgtcgttttcgaccgctaccggcatccgtcgttcgtcgggttttccgtcgggctgacggtcattcccggctcctatacgccttatgcggggatgcacaccgatttcaaagtcggaccgacggtcggcgtgcagggtgcatggttcgcctcgccctatgtcggcgtgggtgggcggtttgcggtgacgaatctggaaatgaacgtaaacggcgtcccgcagaacgatgaattcgagtgctgttccgtgacggcaggtccctatttttcctatccgctctcgacgcgctggcgcatcggctcgaagcttctctgcggttatgagcattataaaccttacactacttccggctacaggatcgaaggccggggcggatttacggtcggaacgggcttttcgtccacctatctggtcaatcgcaatctgggcgtgcgctttacagccgactacgacgtcgctccgccgctcgtttcctcttcctgcgtagcgatgcacaaactgacgctgggcatggccgtaagtgcgatgttctgagatcttgaatcccctaaaatatggacgcgaatcacggctggggattcgcttttgtgttccggatatttttgcgtttcgccgaaaaaacagccctgtaatccgtcaggattgtatatgatatacccctttctcccgggccagtgtgataaggggtatatttcatggacattgaccggggcgaaaaccgggcttgaatgtgaaaactgcggtgcggaatatttgggaggcaggtgcgtgaagtgacgggagggggaaaataaagagaccgaaaatgattttcattttcggtctcttttattaggcagttaatttacagcacaccctgctcgaccatcgacttggcgactttcatgaagcccgcgatgttggcgcccttcatgtagttgatgaagccgtccttctcggtgccgtattccagacatgcgtggtggatcgacgacatgatctgatgcagcttggcatcgacctcctcggccgtccagttgtatttctgcgagttctggctcatttcgagtcccgacgtcgctacgccgcccgcattgacggccttgcccggtccgtaggggattttcgccgcgatgaaggcgtcgatcgcttcggggcggcagcccatgttcgagacttcggccacgatcttcacgccgttggccagcagtttcttggcgtcctcgccgtccagctcgttctgcgtggcgcagggcatggcgatgtccaccttgacctcccacggtttcttgccggcgaagaattgcgcgttcgggaacttatggacgtaaggctcgaccacgtcgttgttcgaagcgcgcagttcgagcatgtaggcgatcttttcggcgtcgagaccttcgggatcgtagatgtagccgtcggggcccgaaatcgtcacgaccttggcgcccagctcggtcgccttcgtcgccgcaccccacgccacgttgccgaagcccgatatggcgatggtctggcctttgatgtccatgcctgccttttcgagcatctggcgcaggaagtaaaccgcgccgaagcccgtcgcttcgggacgaatcagcgaaccgccgtaagtcatgcccttgccggtcagtacgcccgtattctcgcgcgccagcttgcggtacatgccgtaaaggtagccgatttcgcggccgcccacgccgatatcaccggccggaacgtctgtttcgggaccgatatgacgccacagttcgaccatgaaggcttggcagaagcgcattacctcgcggtccgacttgcctttggggttgaagtccgagccgcccttggcgccgcccatcggaagcgtcgtcagcgcattcttgaaaatctgctcgaaaccgaggaatttcaggatcgagggattcaccgaggggtggaaacgcagacctcccttgtagggaccgatcgcgttgttgaactgcacgcggtaaccggtattgacctgcacctcgcccttgtcgtctacccagaccaccttgaaggtaaaactgcggtcaggctccacgatgcgctctgcgatacggttggcctcgaattccggatgctggttgtaggtttcctctaccgtcatgagaacttcgcgcacggcctgcaggtattcgctttcgccgggatgcttgcgctcaagttccgccattaatttgtttacgttcatattgcctgaagttttaaaggttgtttctttattacaaatataaaactatttcttataaattgtaactgcaacatgattttttccgaaaattcgttatttatttctccttttctccggaaaatgtcgtatcggtgcgctgcgggctatttttcccgcgcttcgtccggcgtctctttgacgatgcctttgttcgagcggccgtcgatgcagacccacagcggacgctcgaaacgcacctgccgcaggaagctgccttcgtagatcgcggcgcatttgtcgagcgtctcttcgcggaatacgccgtcgccgcagaaggggctgatcgtcaggtaacccacgcccagcgaggtgacgttctggaagaagtgcgtgccctgcgacggctcgacgtcgaatttctcgatgccgcattcgacgatcaccttggcttcggagatgtggttccacttgacgggtacgccgaggaacggatccgacgaaccccagcggccgggaccgacgagtatgtaggagcgtttttcgtcgcgcatgcggcggttcagctccagcagttcgtcggcgatcttctcggtcgaaagcgaactgaacgtgccgcttttgatgtagatgacgtccgagatgtcgctcatcatgccgatgccgagggcgttctcgccgtagaccagcgcatcggaggtgtccacttcgctccagtcgatcggccggttgtcctgattgtcgatgatcgggcggatttgcagcaggttgaaaatctgctgctcccccggcgccacgtccatattgacggcgaattcgacctccacggggcagcgcatctcctcggcgcccatgtgcaggatgtcggtgacgatctccgccagcgggaaggtgttgtatttcagtatgttgttgaatgttatgactttgcggccccggtcgaaggggctgtccgagatgcgctcgttctcgcggtcccacaccgagcagacgaagcgcgaattgcgcagttcggcgatctgggcgatgtcgagccgccgcaggttcaccgcgtcgtcgatcgacgtgcggaactcttcgggctgcaggctcagggccagcacttcgttctgcgtgtcgcgcagcgccagttcgggcgtcgaggtctggagcaccttctgcggatagcggggcgagaagcgcagcgtgcgccctccgtccacgaccagcttgcctagtcccatggcgacgttgcacacgccgtcttcgggggcttcgtcgccgatggggtagtagttgatcgaacgcgccacgcccgaaaaggtcgggaagaaaagtccgttctgctccgtgccgcacacctcctgtatgatgacggccatcttctcctccgagatcaggttctgcgacgaggagaggtaggctctcgacgatgcgaagtagaccgaggcgtatacgctcttgaccgccttgagcagcagacgcagcatctggtcctcgttgtccacataggggatcatgtaggtcgagtagatgccggcgaacggctggtagtgcgaatcctccagcttcgacgacgaccgcacggccagcggcgtactgacggtcttgatgtaggctttcagctcgcgctgcagtttgacgggaatcgtcgaactgacgaactccgagagaatctcctcgtccgaaaactcctgcgaaatgatgtatttgagtccgttgttgcggatgaattcgtcgaaatagtccgttgcgatcaccaccgagcggggaatcatgatgcgcaggttgtcgtgcttgtcgtactggcggtgcttgagcagcatcgagttcatgaacgccagaccgcgggccttgccgccgagcgacccttcgccgatgcgggcgaaagccaccgcatcgctgtaggtctcggtgtcgaagcgcgccaccacgccctgtccgagcaggatgcggtagtccttgatgaggttcacgatgcgctggcggtgttcttcggtggtggcgaactggctcttgttgccccggcggatggccgcggccagcgggaagagcccccgcgagtagagccatttcgagaggtggttctgcgaggtgtggtattcgaacgccttgtcgggaatcgtggcgatcatctcctgcatctgcgccagatccttggcgcggccgatgacggctcccgtatcggggtccttgaagaggaagtcgccgaatgcgaactccttggcgatatattcgtgcagctgcgagagcagcgttttcgaattcttggcgatgaatccggctcccagcccgcgggcctgcgcctcgaattcggtctgcgacgactgcagcagtacgggcatcagcgggttgtcctccttgatgcggcggcagaggtcgatgccggcgtcgcgcttctcgctttcgggcgggtcgttgcggtggagtacgaaccccacgtcggaaatcacgcccagcatgttcttcttgtaacggtcgtaaagctccacggcctcctcgtagttggtggcgagcaggatcttggggcgtgcgcgtttgcgcaggatctgctgctgttcgttgagggcgtccttcaggaattcggtgttctgcagcaggatcagtttgtagagttcgggcaggtaggtcgagtagaagcggatcgagtcctcgaccagcagaatggcctgcacgccgccctcgacgatatcctcctcggcgttcatcttgtcctcgaccagcttgatgatcgccatgatcaggtcggtgttgccgtgccagccgaagatgtagtcgagtcccgaacggtcctgctcctcgatgcggcggtagatgtctttcgagaaggaggtgagcagcgccacgggaatctgcggatggcgctccttgacgatcttggcgaacgtgaagacgtccagttcccccacgttgtacatcgtcaggatgaagtcgaacgaatcgtcgcgtccgagcaggtccagcgcctcgcgcgtcgagctgacgcgtgtgaatgacggcgggttcgacatgttcaggtcgaggtactcctgattgatctgcgactcgatatgtccgtcttcttcgagaatatacccgtcgtagctgcagcagaccagcaggattttgtggatgcggtatttcatgaagcggtactggggcctgtttccgtccgaaagggattgttcgagattcttgttcatcgtgtcgcctgatttgttttaacaaaaatagaaaaaaatccgcgaaatgagaaaccgtgcgtttttacctccctgccgtctccctgccgtaccccgtgctgcttccctgccgtaccccgtgctgcttccgtgccgtaccccgtactgcttccgcgtcgtgtcttgtactgcctccgtgccgtttccgtaccgtctccgcgctgtttcggcggcatctgtttccatacggctccgccggccggaacggcggcggggttttcacggttccgcagccgggtcgcaggcccggacttccgcggccgccggcgtttcggcgctgaacaccatgtgccgccacaggtacgggatgcgccccgcgccggtgaaggccatgttgcggaacccggcttcccgcagcaggatggcgagcgtcctgcgggaccagaatttgatatggccgccctcccacaatgcgctgtagtggcgatccgctttgccggcgagggctatcgagaggtttttcaggtacccgtggtaaggcgtggtgagtatgaaacgtccgccgccgttggcttcgaggatgctgcggacgaaggcggcgaatgtccgcgggctgtaaaggtgctcgatgacctccatcgagatcacggtcaagaaggggattttccgcagttcgggcggcagctcgcccgtcgtcacgtcgcagacgaagaaacggccgggattcccccccccgtccgattggcgatggctatgccctgccgcgatgcgtcgatgccgtaaacgtcgtagcccttgccggccagataatttgcggtgaagccgttgccgcagccgacgtccagaatcggggtgccgtcggccgggagcagccgctcgatgtatttgcagaggagttcgtggtagaatgcgggctgagcatcgctccagccgaattcgctgtagtctgttgtcatggggatcgggggattgtgcggacgcagtttccacaaagataaacaatttttccttgcggacaagcgaaccggccgccgcgtacggggcggcggctttgcgactttcccgcctgtttcattccattttcgttttttatttctatctttgttctggtctataaaaaacatccatgaatgaacagtgacaaatacgtgcttcaggaggtcgtcacgcccgcgctcgaacgcgagtggctcgacctccccaagaagatttacaagggcaaccgcaactgggtctgcccgctcgataccgatatccgcaaggttttcgatccggcccgcaacgagcagttcgccgaaggcgaagccgtccgctgggtggtgcgcaaccgtgccggcgaggtcgtggggcgcatcgcggcgttctacaaccgcgagaaggccgcactcgaagagcagcccacgggcggctgcggattcttcgagtcgatcgacgaccagcaggtcgccgacctgatgttcgacgcttcgcgcatgtggctggccagccgcggcatggaggcgatggacggcccggtcaatttcggacagcgcgacgcgtggtggggcctgctggtcgagggctacgagttccagccgctgtacgagaatccctacaacccgccttattacaaggagctgttcgagaactacggattccggaactacttcaaccagaacacctacatctggaaaatctacgacgacgacgtgaacgccatggtccacgaccgggccaagcgtctcttctcgacgccgggctacggtttccgccagatcgacatgtcgcgcatcgaggaggaggccgagaacttccgcatcatatataataaggcgtggtcgctcttttcgggcgtgaagcccatgacgcaggaggaggcgatgaagatcatggagacgatgaagccgatcatcgacccggagatcatcttcttcgcctatttcaacgacgagccgatcggtttcttcatcatggttcccgacctgaaccgcatcatcggcaagttcaacggcaaattcggactcattcagaagctgcggatgctctgggacctgaaggtccgcaaggccagcgaccgcattttcggcatcatcttcggcatcgcgcccgaattccacggcaagggcgtcgagtcgggcatgatgcgcttcatcctcgaaaaatacatgcgcacgccgcgcaaccactacaagaccatcgagttcgcatgggtgggcgacttcaatccggtgatgaaccgcatgatcgaaagctacgtctgcgccacgcgccacaagatgcacaccacctaccgctacctgttcgaccggacgaaggagttccaccgctgtccgcgtctgggtgtcaaacgccgcgaataaaaccttaaaatcctgatatgaaaaccactgcattcaccaagtaccacattgccgcgggggctaaaatggccgaattcgcgggatacaatatgcccatcgagttcacgggcatcaacgacgagcacatggccgtccgcggcggcgccggcgtcttcgacgtgagccacatgggcgaaatctgggtcaagggacccaaggccctcggcctgctgcagcgcatcacgaccaacgacgtgtcgaaactctacgacggcaaggtgcagtatacctgcatgcccaacggccggggcggtatcgtggacgacatcctcgtctaccgggtcgatgccgagacctacatgctctgcgtcaatgccgccaacatcgaaaaggactggaaccacatctgcgaacagggccgggcgttcggcatggaggcaggccacggcaaggagctttacaacgcttcggacgaaatctgccagctcgccgtgcagggacctctggccatgaagatcgtgcagaagatgtgcgacgagccggtcgaggagatggagtactataccttcaaaaagatgaaggtcgcaggctgcgacgccatcctttcgatcacgggctataccggatcgggcggctgcgagatttacgcggccaatgaagacggcgacaaactctggaaagcgctctgggaggccggcgaagagttcggactcaagaatatcggtctgggcgcgcgcgatacgctgcgtctggagaagggcttctgcctctacggcaacgacatcgacgacaccacctcgccgctcgaaggcggactgggctggatcaccaaattcgccgagggcaaggagttcatcgaccgccccctgctggagaagcagaaggccgagggcgtgacccgcaggctggtgggattcaagatgatcgaccgcggcattccgcgccacggctacgagatcgccgcgcccgacggcacgcggatcggccatgtcacttcgggtacgatgtcgccctgcatgaaggtcggtttcggactgggctacgtgacgtccgaatacgccaaggcgggtacggaaatcgccgtcgtcgtgcgcgagaaacccctccgcgccgaagtggtgaagattccgttcgtttaatccgctgcggcggggctgtgccgaacagccgcctgagccgggtccgtcccggccgtgaaagcgattagtaactataaaaagctctttttatgaaagcaaaatacctcggactcgacctttcgagtcccgtcgtggtcagcagttcgccctatacggccacgatgtccaacatcgaacagtgcgtgcgcaacggtgcgggcgccgtggtcctcaagtcgatcttcgaggagcagatcatccgccatgccgcggccctcgactatgcgtcgcagcagggcatgggcgattcgggcgagtacctcgaacgttatatcggcgatgcctacaagggtgaattcctcaaacttgtcgccgatgcgcgcacgacgggcgtgcccgtcatcgccagcatcaactgcatcgcttcggccgaagcgtggaccgactatgccgtctcgatggagcaggccggcgccgcggcgctggagctgaacatcttcctgcagccgaccgaccgtcaccgttcggcgcaggagctggaacaggagtacgccgacgtcgtacgccgcgtggccgaggccgtgaagattcccgtgtcggtgaagcttcccatgcgcctgaccaacgtgctggccgtggccgattcgctgctggcgcgcggcgcccgcggcgtggtgatgttcaaccgcttcttcgaacccgatatcgacgtggagcgcatgaccttcgtgaacggcgatccgttcagcgagccggccgaactgcgcaacgtcctgcgcagcgtggcgctctgcacgacggccgtgccgcagctcgacgtctccgtatcgacgggcgtgcacgacggcgaagcggccgtgaaggcgctgttgtgcggcgcgaacgccgtgcagatctgctcggcgatccacgagaagggctacggcgtgatcgtggacatcaaccgcttcatcgacctgtgggccgaacgccacggcttcgggtcgctggccgagttccgcgggaagatgaattacggcaatgccgaaagcgacgtctaccagcgcgttcaatacatgaaatatttcccgcacgacgccgaatagcggcgcgcggaaccgatctgaggaggtgcgtcccggagaccgttgcggtctccgggacgtctcttttcgggccgttcccgccgccggggcatgcggagcggattttttcattcgtcaggcaaaaacatcttttgcgggttacgtattcggagccggatatgtgttcttaatataggcgtcgttacggcggcgcccctgaaccgaccgaaactcaacaaaccttaaaattaaaacgaatgaaaagaatcttgactctgatgttcgccgctgcgaccgttttcgcttacggatgcagcgacaacttcgacgattcggccctgtggaaggacatcgacgggatgtacaagagcctcaacgaactcaaggctcaggtcacgacgatgcagcagcagctcgacgcgctggccgcagtcgtcagcggcggtgccgtcacttcgatcacgcaggatgccgacgggcactatgtcctcagctacaaggatgccgacaacgtggagcacacgatcgacatcgcgaccatggacgacgccaatacccagccgatcatcggcatgaaggccgacggcgaaatctactattggaccgtcaccacgggcggcaagacctcgtggctgctcgataccgacggcgccaaaattcccgttacgggccgtacgcccgaaatcggcgtagacgatcagggctactggacgctcttcggcaagcggataaccgatgcgtcgggcaatccggtgaaggccgagggcaagagcgcttcggtgatcaccaaggtcgaaatgaaggacgacggcacggtggtcttcacgctgggcgacggcgtgcaggtcacggcgcgggttcagaacggcttcaacgtgctgctgagcgtcgaaccccggaccgtagtgcccgacgtcgcgcagccgcttgtgatcacctatacgctcgtgggcgagaccgaaacttcggtgctgaccgtcgagaaggccgaaggactcgcggccaaactcgatgagcaggccaaaaccattaccgtgaccttccccgacggcttcgaggagggccgtttggtcgtgatgttctacgacggcgcggacaacgtgattatcaagccgctgatctttacgacgatggagggcgcgccgacgggcattcgcaacgccgacgatctcaaggctttcgcctcggcggtcaatgccggcaagagtctggccaaatatacgatcgacggcgaagtctgcctgatgaacgacatcgacatggcaggcacggactggagcgattatgtgatcggcggagtcgtaactcccagcaccgccgatgcgaacaaggcagtcacctatgcaatgggtgaaaatgtcttcgataaagtgttcaacggcaagaatttcgcgctgaagaacgtcgattggaccttcgaccttgcggacggcaacgtcgcccacggcctcttctcggccctcggcgccgaaggcgaaatcaagaacctcaccatcgaaggcgtcatccgtctgactggcgcggctccgcagggtgcggcgatcggcgctttcgccggctatgccgaaggcaaaatcacctcctgcaccaataaggccgcgatcgcattcgcgggcagcgacgccgccaacatctcggtatgtctgggcggcatcgccggatatctccagaacgcgacgctgacgcagtgcgtcaacgacggcgcgctgacctgcggcacgatcgccaacacggcaacggctcccaattcgggattccatcagggcggcatcgtcggttacatgaagacttcgtcgctgaccgaatgcaccaataacggcgctctgagcgctccgtcgggacgcagcggcggcatcgtggccgtggctaccagcggtcaagtgaccgcatgcgtcaacaacggaaaggtgcaggacgacgtgaacggtattttcggcgccaatccgggctataagcgcatgggcggactcgccggcggcgcttcggccgacgccgcgttcacttcgtgcgtcaacaacggcgacgtcttctcgcagctgggctgccgcacgggcggcttcgtcggccataacgaggccaagatcaccaagtgcgagaacaagggcgtcatcctttcggaccacacgctgtcggggaccaattaccacggttcgggttgggcggcaggctacaacaagagcgccgacctgattaccgaatgtgtggtcggcggccgcgtgggcgactataccgcatacaaggacaatccgcagtcggctcccgaagcgacctatgccatggcgatcgtacacggaaaattcgatccgacgctcaacggcctgagcgaccagtacgaggagttctacgactgggaggtgaaggcggagacgcagctggccgagggtgtgaagttctaccactacgcgatgaagaatttcgcccagaacgtctacgtcgtcgaggccgacctgaccaatcccaacgtggtgctcgaaacggtcatggccgacgaactctgtctcaaccccaatgccaacaacaactcgaacaacggcaagaaactgcgcgaaacgctctccgagacctgtacgcgccgccgcgccgagggccgcaacatcgttgccggcatcaacacgggcttcttcaattcgcacgacggtttcccgcgcggattccacatcgaatacggcgaaccggtcttcatcaacaacccgaccgtgcgccagtcgctttcgaaccaccgtcccggcttcaccttcttcgaggaccgtaccgtcagcttcgacaaccgcagcttcacgggctatctcaaggtgaacgatacggactatgaatactactcggtgaacgatacgatcgtccggctcaacaacaccgacggttacgacgccaatctctatacttcgcgcttccgaaaggagccgcatccgggcatctacaatccggtgggcagcgatgcgctcttcgtcgtgggccgctgctcgcagcagatgaccgtcaacgacggctggttcgacgcgacggtcacggcgatcgtggacggccgcaacggagcctcggtcgaggtgccgttcgtgagcgaaaagaccgactgggtgcttcaggtgacgggcgaaaaggctgcggcgctggctgcggcgctcaaggtgggcgacgctgtccggatcaacgccaacgtgtctatcggcagcgtctccaaacagattatcatgcacaactccagcatgtaccgcttcctgaacggcggcaactggaatgcggtgaacgacgcgacgctcatgccggccacctgcatcggagccgatcaggccggcacgaccgtcaagctggtctgcgtggacggccgcacgagcatcgacaccggcatgaactactggcaactttacatgaccatgaagaaactggggcttcacaatgcgatccgtttcgacggcggcggctccacgacgttgtggaaatgggagaacggcgccggtgcgatcgccaacaggccctgcgactcgaagggcgagcgcagctgcatgaactacatgcatgtcaggatcaagtagcaaggaacccataaacgactaaatgaacagaacgatgaaaaagatattgaatacgatcttcctcgctacattcctgtttgcagcggcatgcagcgacggatacgacgatacccgtatcaagaaggacctcgacgacgtggggcagattctcgatgaactggaacaggccgtggacggactccgtacgcagatggacgcgctcacgcagctgataaacagctcgttcgtgtcgctcatctcgaccgatgccgaaggcaactacgtcatcacctacatcgaccgcggcggggagagccgcacgcttaccctcgccacccagaaagaggttgtcaccctgccgatcgtcggcatcgccaaggacgaggacggcgtgtggtactggcgccagacctccgacaacggcgagacctacgaatggatactcgtggatggcgagaaggttcccgcaggcggtgagaaacccgaagtgggcattgacgccgagggcttctggacggtgaacggcaagccgatcaccgacgccaagggcaacaaggtgctggccgacgacgtcagcaacatcctcttcaaagaggcttacgtggacgaaaagaccggcgaagccgtcttcattctcgccgacggcaccgaactgcgcctgcagatgttcgaggcgctgtccgtttcgttcgactcgccgacctacacggccgttccggactatgcctcgaaagtgaagatcagatacaccgtcggcggttcgcaggcggaaggcgcgctggtggatatcttcacctcctataacgtcgacgccgagatcgacgaatccatatcgacgatcaccgtctcgctcaaggagggcgcccaagagggcaatatcctcgtcatggcgcacgccgggggcaatacgattctcaaaccgctcttcttcacctacggcacggccgagattcaggacccggtttacaacggttcgacggccgatatcgtgctcgaaggcgacatgacgcagttcgaagtcaaggtttcggccagcatcgactatgaagtaacggtcgaggagtcggcgtccaagtggctcatatacaactcgacccgcgcgatgacgacccttacgcacgtcttcacggccgattactacgaggatgcgagcggcgcgctccgcacgggcgaaatccgcttctcgaatgcgctttacgacatctcggcggcaatcgtcgtcaagcagtcgcccaagattcccgaaggcggcggaggcggcatctcgaccgcggccgacctcatgggcttcgccgcggcggtcaatgccggagccagcaccgcacgctgggagaacgaggcgggcgaagtcgtgttgttgaacgatatcgacatggcggccgtcgagtcgtggacgccgatcggcggcgtggatgccagcgagtacaatacgacgactccctacaagacggtcaatcccttcaagggcaccttcgacggtcagggcttcgccgtcaagaacctgaactatacggccgacatgtccaccggcaagtggggctacgcgttcttcggctcgctcgacggggctacggtccgcaacctgacgctgggcgatcccgacaccgacatcacgtggaccttcacgggcgacgccccgaaggcgacgagcgtcgcgtcgctggccgtctatgcggtcaactcgacgatcgaatcgtgcaccaactactacaacatcgacttcgccggagacagcggttccgaagtgctctgcgtggcttcgggtctggtcggcgtgatgaagaactcgaccatcggcggccgcgccaagtcgctgggatgcgcgaattacgggttcgtacgcacgggcaagatcaccaacaacggcaacggcggcaacggcatgcagacggccggtatctgcggcttcatggccaaggacgaaggcaacctgattcagttctgcgtcaattacggacacatcagctgcccgacgggccgcacgggcggtctggtcgctacgctgatgaacggcaacgtgaagaattcggacaaccgcggtacggtcgaggacgacatcgtcggcaagttcgagggagcggctgcgcagaattcctacaacagcaagcgtatgggcggcctgatcggcggtacggacgacctgaagaaggtgctgacggcgaccgtggagagctgtaccaactacggcaacgtgttcacccatatcggatgccgcacgggcggattcatcggccactccaacatccggatcatcggctgcgcgaatcagggcgccattctgggcgacgtctacaattccgaccacggtccggcatgggcctgcggatattcgggccagtcgagcggcgagtgggtcaacgtcagcagctgtacgatgggcggatacgtgggcagctacaccacctacaaggacaatccgacttcggcgcctgccgcgaccgttcacaatgcgttctcgtacaagaacgacgagtactacgatccgacgataaacaactaaaaggctgtaatccagaaaaacggaacgacaatgaaaaagatactgaatatcatcatactatttgcggccgtggtcttttgcggttgcagcgacttcgacgattcggagctgcgcggccggatcgacggctacaaaaaccggatcgaagccctgaaagccaaggccgagacgctcggcaagcagctcgcggacctgagctatctgaccaacggcaacgtcatcaccaccgtgtcgcaggacgccgacgggaaatacgtcgtcacctacaaggacaacaaggacgtcgaacatacggtcgtgctggcgacgatggacgacatcgttgacgtgccgatcatcggcgtgaagctcgacgagaacggcgtctattactggaccaagtgcatcgacggcgaaatcacgtggctgaccgacgacgacggggagaagttccccgtgagcggctacacgccgacgatttcggtcgatgccgacggctgctggaccgtggacggcgtgcagatactcgacgcttcgggcaacccgatcaaggccacgaccgacgccacgtcggtattccgctcggcggagctggacggcgacggcaatttcagcctgacgctcggcgacggaagcacgatcaccctgcgggttttcaactcgctcaacctcaagctggacgcgatgccggttaccaccgtcgcagacccttcgaagagcattacggtatcctacgagctttcgggcgaggctaaggagacggccatcgtggccgtcgccaaggccgaggggctcgacgccgtgatcgaccgcgacgcgaagacggtgacggtttcgttcgacgcttcgttctcgcgcggtacggttatcgtcatggcctacgatctggccgacaacgtgatcgtgaagccgctcttctacaaggccgcgacgctcggtacggtcgccatttcgacgcccgaccagctggtcgctttcgccgcggcggtcaatgccggcggcgaggaggcggccgccaaagccgtgctgacgcaggatatcgacatgaaggacgtggcgtggaccccgatcggaaacggcgcctatacgacggccaacgcgatgacgggaccggcgtttcagggcaccttcgacggacagggccatacggtcaggaatctgaagatcgtcgttccggccgacgctgcggcgggttcggcttggggactcttcggcgtgctgaagggcgccacggtcaggaaccttgccatcggcgaaggctcgtcggtcgtttcgaccgcggctgcgatgacggccgtgggagccgtggccggatatgcctatgaagccacgatcgagaattgcgagaaccgtgcggcgatcgacattcagggcggcggggacaatgtacgcgaatcggctggcggcatcgtcggcgcgatctgcgccaacgaaaatgacagtcatatcctctcctgcaccaattacggcaagatcacgtcgaagaacagcgtgaacaccaagaacggagccacgggcttctcgatcggcggcatcgtcggtttcgccgacgcttcgacgaccaccgaacgctacaacaacgtcgtggggtgtgtcaacgaaggagcgatagatgcgcaggcgacccgtacggcgggtgtcgtcgccacgatgaacaaatacacgaagctcgaaagctgcgtgaacaatgcggcggtgacctgcagcgacgtgacggcttcgaacagccgcgtggcaggcatcgtgtcggccatgggcggccacacctacctcacatcgtgcgtcaataacggcacggtcgctttcgccgttgcgggcgatacgacgcacggctatgccgcgggcatcgccggccagaccaacgacaacaatacggccatcgacggctgcgagaactacggcgccgtactctccgacatcatcaatgccgcggcgaacaagtacatcggcatcgtctgcgccaacaccaacaaaaagaccatcgcgatccgcaactgcaagatcggcggccggataggtcccttctcggacggccagcagggcgcgacggagattacggagcagaatttcgaacagtatatctacttcacgctcacgggcggcggcgtgccgacgctggagaacaacagcttttcgggcggacccgccaagccgggcattgcgacggtcgaggacctgacggctttccgcgacgcggtcaatgcgggcgaaagtacggcgcagtgggaggatgccggcggcgtggtgtcgctgctcggcgatatcgacatgaaggacgtcgccggctggacgccgatcggcaacgcctcctataaatgggaaaagaacctgctgactatcgagggcaacgccttcaagggcaccttcgacgggcagggatatgcgctgaaaaacctgcaactcgcctacgggggcagtgcggccaatacggcttacggactgttcggcgtgctggacggtgcgacggtgcgcaacctgacggtcggcaccgccttgggcgatgcgagcgcattgaaagtcaccgcttcgggcggcacggccgaggtgggcgtgatcgccggcgtatgccgcgatgcgaacgtctccgactgcgtcaattatgcgaagatcgaatacgacggcaccagcgccgcgcgtgtttcggcggcgatggtgggcttcatcttcagcgaaacggagggcacgaagctcgaacgcctgcagaattacggcgcggtggaggccgatacccacggcaattcgaccaacggaggcaatacggcgatccacatggcgggcatctgcggctttgcgacgggcaacgcgaccaacaagatctgcaacgacatcgcctactgcgacaattacggcaatatcacctctaactcggcgcgctcttcgggcatcgtcgccgcggcgaatacctacacgcggatcaactcctgtgtgaatcacggcaaccagctcaatacgtgcggtacgacgggccgtctgggcaacatcacctgcatcacgggtacgggatgctcgatgaccgactgcatcaacaacggcaatctcgtctcgacgggcggcgcccgctgcggcggtctgctcagtctggccaaccatgcgaccaactcgttcagcggctgcgccaattacggcgagatcgtcaccgacgacgccaaccgcggcgtgttcttcggctacagcgcctatgcgaccagctggatcaactgcatcgcgggcggcaaggtcggggtttacaacggcggaaccacggtttacgattcgtacggcgagaacgagcaggtgcgttatctgggcgtgcagaaggccaccgatccgatcaacgcggacaacattacctacctgatcggttcgagttcgggcggttcgggcggcgacgacgatgtggagccgacgctgcgcattctcttcatcggcaacagctttaccaaggacgccgtcgagcacctgccgaaaatggtctcggccgccgacattccgacgctgaagatggtgcatctctattacggcggtcgtacgattccagaatatgccgacggctatgcgaccaagtccgactatacctgctacaagtacaaccccggcacttcgctctggctctcctacaccggatacaacattcagcagatcgtcaagtcggatacgtgggacatcgtctgcctgcaggaacatacgggcaacagctgcggctggatatggaacgacaccgagaaaaacgccattcaggggttgatcgccgacatcagggccgaccagaacggacatacgcccaagttcgtctatatcatgtcgcaggcctatttcaatatggacaagatcggtacggcgcagcgtccctacaagaatttcacgacgcaggacgagatgttcgacgtgatcgtggcgcaggcccgcaaggtgctcgaccagaccgacgtggagcagatcattcccaccgggacggtgctgcagaacctgcgcacctcgccgctcaacaacgacatggacctcacgcgcgacggctatcacatggattacggcctgagccgctatgccgcggcctgcgccgtcttcgagtcgatcatctcgccttcgttcgacggcaagaaactcgacggcaacagcttccgctacaacgtgtcgagtacggcggacggcacttatacgacgcccgtgaccgacgacaatcagccggttgcgctgcaggcggcgcgctacgcccttgccacgccctttgccgtgaccgacatgtcgcccggcacccagacgcccggcaacgggatcgaggacaccgattttgaaaacgattcgaacaaagagtaaagcagaaatcctatgaaacagatatttgcatggttattcgccgcgattttcttcgcggcagggtgcgcgcagtctcccgatctggcggagccggtgcggggaggcggatatgagaatgccgacgggctggtgatcgtggccgcctgcccgcccgcgacccgcacggacatcgaagagggtaaatcgacttgggaggcgggcgaccgcatcacggtcgtttacgacggcgcggcctatgaatacacggccgcggaagcgggaccgacgaccgctttcacgagcgaagccggcatcgccgactacgacgcttcgaagcctttgacggcctactatcccgcaacgactgccgaaggggtggtcgccgtggaggccgagcggacgattgcgctcgacgcggagtcgcagagcaatccggcgcgggcgccgctcgtgggactgcccacttcggggaatcttgccgaaggtgcactggaggtgaccttccgcaatatcttctcggtcatcgaactgcgtatcgacgcaggggagttggcgagtgcggcgcagtcgctgaccgtcgagccggccgacgaagcggctttcgaagggtttctgtcgttcgaagggacggtagaccccgaaacgctggcgctgacgcccgccgagaacggtacgggcaacagcttggttttcaacttcgccgagggcgtggatctgaccaagccccagacgatcaaattccccgtcgggcgtttcagatccgaagcggggctgcggcttacgctcggcacggccgacggcaagagctattcgaagaatatctacaagaccggcatcacctcctatgccgagcagggcggcgtattccgcgccaagcatatggccaaggcgctttacgccttcgcgccgcagggcggcatcagcacggccgacgacctgatcgagttcgcggcggccgtgaatgcgggcgagacgctcgctccgtggcaggacgacaagggcgtcgtggtgctgctggacgacatcgatctggccgaggtgacggagtggacgccgatcggcgcggctacgtccaagctggcgagcaatgcgctttcgatcacttcgggaagaccttttacgggttatttcgacggacagggccatacgatccgcaacctgaagatggtctgcaaggccgcgcaggcgacctcggcatggggattcttcggggccgtggccaacggggccgtggtggagaacctgattttcgacgcgagctgctcgctcgaagacaaggcgacggcgggcaccgactgcggtgtggtggccggtctggtttacgaagcaaccgtgcgcaacgtagtcaataaggcttcgattgccttcgatggggcggctcccgacgaaactcgcatgaccatcggcatggtgggactcgcctttgccgacaaaaacggggcgcggctcgaaaaactggtcaaccacggcgctctgacggccacgtcgggcggcaacaccaagaacggcgcgacgggcattcacgtgggcggtatcgtcggcttcagctcgaacaagagcaacacgacggccgtggtgacgatcgccgagtgcgccaattacggagacctcgacacgcaggtagcccgcgcttcgggtatcgtggccgctgcgaaccgctacaccgagatcgagaactgcgtgaacgaaggcgacaacgtcaatgcctttgccacggtaaatagcgcccgcatcggcaacattacctgcattacggcagtcgggagcaagatcaccaataccgtcaatcgcggcaatgtgatctgcaagacgagcggcgcggcgggcggcatcatctgtctggtcaatgacgacggcaacgcattcgtcggctgcgaaaattacgggctggtgattaccgaccgcgccagttacaagggcacgctcttcgggcagtgcaacaaggcggccagattcagcgattgcatcgcgcagggcgatctgggcgcttacgaggacggctcctatgcgctggtcggcgtgaactacacgaattacatgtcctacatcggcgaccacaatgcgacggccgtgcatgtgaacagccagaacatcctctattatcccaacggttcgcaggtgcccgccgagccggaattcggcgtgaacctttcgtcggtcgagctgaatgcgcagggcagcaatgccgccgtcgtacagctttcgtcggtcgattacgactggacggtgagcgccgacggggattgggtgcatgttacggacctttcggacgcacccgtcgtttcgggtgtcagggactccggcgtgcagtatatcaagatcggggccgatgccaatacgaagaccgcgccgcggtcggcggtcgtcacgttcgcttcgaccgacggctcgaaaagcgcgacggtgagggtcgatcagcaggcgcggggcgaagcgttccccagcaagtgggtgttccaagcttcgacgctgccgctttacggctcgtcgtggaccgacgacaacgtcattcctgcgacatcgggcgcggcgggcttcatttcggtcgtgcgcggcgatgcgaatgcttcggccgctttcaagcggagcgtcgttacgaaccgtcctgcggtttcgacgatggtcgagggcgactactggctctataccttcccggtggagaatctcgccgccagatcggtcgtcgatttcaacgccacgatggcgggtgaggccaattcgcccaaatacttcatcgtcgaatacctcgacggcggagtctggaagagcgtcgaggccgatctgctcacggctccggaaaacccggcggtccgctatacctacaagtgttcgggcactgccaccgggtcctcgtatcagcacgcgaccgtcatgcagacgatgcgcttcgaaaacgccgtgaccgacggcgaagtgaaaatccgctgccgcgccgtgggaccctatacctgcgcgggcggtacgcagaacatcacggcgaccaacgccgccagctccattcctccctacggatttacgggcagctacgtgcagaacttcggcacggcgacgccccgcgacaccaagaaggtgctgtgtctgggcaactcgttctcctactacagcaaccctgcgtggatgctcaaggagatcgcatggcgcgaagggcatgctctcaacatcaaggctcacttcaaagggtcgcagacgctgacccagcatctgtcgctgggtttctcgaccgacgtcatcgaacagggcggttacgatttcgctttcctgcaggaccagagccagaatcccgccaactatggccgcgacgccacggcgtcgatcctcacgggccttacgaccttggccgacaaggtgcgcgccgcgtcgccttcgtgcaaggtgattctggaggagacgtggaccttctcgtcggcgtcctacggcggctttaccgatttcccgaccttcgagacctataacgacgccggagccaaagccatggcaaaggccgccgggacttgggtgtcgccgatcggccccgccttcaggcaggtgcgcgagggcggttcgggcatcaacctctactactcggacagcaagcatcagtcggagtacggcgcatacctgaaggcctgcgtcaattatctggtgcttttcggcgagcggttcggcgcagatccggccgactgcggattgaatcccgacaaggcggcctacctgcgttcggtggccgagcagatcgtgctgggtaacgagggcgactattttatcgaacgataaaccaaattgcataaacttttatgaagagacttgtcagctgtattctggccatccccgcattgttgtggggatgcgccggacctaaaaccgccgctccggaatacccgacgcatgcggcgaaaatcgtggccgagattcacgatcccgcgtcgaaatacgtcgtggtggcttcgcaccgcggagactggcgcaactatccggagaattcgattcccgccatcgagtcggtgatccgcatgggcgtcgatatcatggagctggacctcaaactgacgaaggacagcgtgttggtgctctgccacgaccataccatcgaccggaccactaccgggcggggacgtgtgtgcgacatcacctatgattcgattcagcgctgcttcctgcgtacggcgcacggcgtgcgtacgccccagaagatgccgaccctgcgcgaagcgctggaggtctgcaaggaccgtatcgtggtgaatatcgaccaaggatatgagttttacgacatggcgctgaagatcagcgaggagctcggcgtgacggagcagatgctcatcaagggcaagcgtccggcggaggccgtcgccgccaaattcggcgaatacgagcacaacatgatgtatatgccgatcatcgacattctcaaaccgcagggacagaagcttttcgacgaatacatgtcgaagggtatcgtgccgctggcctacgaggtttgctggaacgagtacacgcccgaagtgaaggattgcatggaaaaggtggtggagagcggatcgaaactttgggtcaattcgttgtgggagtcgctctgcggcggcttgtgcgacgatgcggcgtgggagagcgacgatcccggctcggtttacggcaagctgctcgacatgggcgcgacgatgattcagaccgaccgtccggagctgctgatctcctacctgcgttcgcaggggcggcacgactgaccgccgcaccggcggaggggtctcggaagagggagcgccccgttatgaaaagagccgtcactcgctgcgagtgacggctcttttattcgctgctccggccgcgtcagtcgaaaagctcgttcaggacggcggccagccggtaaccggcattgcggatctggtgttcgaccagcggcagggccttgttcaggaagtcctgtcccagccgctcgtcgggcttggcccactcgaactgcacttcgcaggtcacggcgctgtcgtgcagccagtcgcgcggcgtgccggcctgcacggcggccttctcccgcttcgatgcgcggtccagctcgccggcccactcggtgacggaccagatacgggtcgtggtgatgatctcgttgtcccagacgtggtggacgtaatacttgtggggcttgtggtacttgtcttcgaacagcacgtcgtacttcgtgttgtgggtcgtgtatttgatatgcgcagggcagtgcatgtcgccgaccagatggatgacgtatttcagattgaccgctacggccgagtcggtcaggctgcggtaatccctgaggttgcggatcgccagctcaagcccgtaaacggcattgccctttcccggcttgagcagttcgtcgccgtagcgcaggtccgcacccacgggcgccgtgtgccagtcgttggtgaaggcgtattcgggcgtctggcggtattcgtccatccatttggcgtagtagacgacggagtgcccgccgagatacttctcgatccgtttcttggcccgtttggtgaggttgcgttcggcgatcttggcgatcgtttcgtggccttcgcggccccacgcccgcgcaggttcggaagcggagagggagagagctgccgcaaagagcagcaaaagcagttttttcatggtctcgatggttttggtgagtctgttttttcgaagaagaggtatcccggtcaccggaatacctcttctttgtgtcgcggagcaaaggggcgtcagaagctcagtccgtcttcgtaacccggattctggctcagtgcgccgcccgtggccacgcgctggtcggtcgggatcggccacagatagtcgcggccctcctcccatttgtaggtgcggccccggaagcagacgatatagccgctcgtgccttcggtcagctgggcgtccttaccttcgccgatttcgagcatcgcgtcgcaggtcgtggcgggcttggtgccgctccagaggcagaggtccatcttgccgtcgccgttcatgtcgtattcgcccagcgaggggaagtagcagccgaggaagccgtcgagtccgttcgacgagggaaccagctgggcgccctccttccagcggagcatatcccactggcgcaggccttcgcagggaagttcgacggtgcgttcgcggcggatttcgaggatcacgcctttgttcgctccggaattgacgttggggtagtagctggccatcagcggatcgggattgttgttggcggccgtcatgtcgagggccggcatgcccacgcggtcgcggacgacgtccacggtcagggcgatgtcttccggggtcagcgtacccagctcggccttggcctcggcgtaggtgagcaggatttccggataacggaataccggccagtcggtagtcgaggtggtggcgccgttatgcgtgtcgtcgctcacgaacttgatgaagcggtaacccgtcatgtcgtagctcttgcagtcctcgatcacctcgtcgatgccgttcaggtccacgtatcccggagccatgagcgtctgcgccatgcgcgggtcgcggttctggaactgctggttgtaggtcatggtctcgtatccgggctggtcctgaatcttcgagccgtcggccatcaggtagtggttcaccagccgctgcgtggcgctgtggcgcatgttgcggaacgtgaattggatgccgtggcgtacgaggatgtcggcgttgaagcgcatcgagaggatcgtctccttggcgtcgccgtcttcgaggatgaaatattcgcggtagggggcgtcgagtttgagcgtattgcctttgtagagcgaatatttgttctgctccatgacggcccatgcggcgtcggcggccagttggaggaaatagtcggccgagatggtcaccccgtcgatcgtctcgtcggcgatgccgtggtatttgcggaaggtgccttcgtagagcgcggcgcgggccttcatggcgcgggcggcgtttttgctcaggcggtagagcgcgtcgctcggccagttgtcgggcaggtccgtgatggcgcggtcgaggtcctccatgaccttcttcatcacgaatccgcggctgtcgcgcggccgtttgagcgaagcccagtcgttcgacggaatcacgaagtcgtaataggggatgtcgccgtatttgcgcaccttttcgaagtagaacagcgcgcggaagaaataggccacgccgtcgtagcgctggcggatcgtctcgtcggggcagttgcccgaacgttcgaggtagtagttgatgtaacgcaggtaggcccatgcgcttgtgccccagttttcggtggccggggagcgcgtgccctgctgtacggagctgaggttcttggcgatctggatgtcggagacctgaatggcatcggtgtcgggacctgcgaagagactgtagaagcggttggtccaaagctccagctccgcttcgctcgaaaagaacgtattgggcgaaaggttcgtttccggctccttggtcaggaagtcgtcgcagcccgacagcgccagactcatcgaaacgaatatcaatattttgctgatagttttcatggttgatcgaaataatgctttccggttagtttagaaggtgatgtccacgcctacggagaaggtccgcgaatagggatacagacagtcgttggtggcgctggtcgtggctacttcgggatcgaccgtcttgctgtagcgcttcaggggcgaccagtaggcgaggttctcgcccgatacgtatacgcggaccttttcgaggatgcgcttgttgatcgggatggtgtaacccagcgtgatgttcttcaggcggatgtacgaggcgtcctgcaggtagcggtcggttttgacgttcatcgaacctgcgctcgaagtctggtagctgcgccggcgggggaagtaggtgttgcggttgtcctcgctccacgccagccgctcgaagtccttggcgatgaacgtggtggtcgggaagctgtagggtccccagaagtagtagcagttggcgctgggcatccagtcgatcttgccgacgccttggaagaagaccgcgaagtcgaagccgttccagttcaagtcgccgcggatcgagtaggtgtaacgcggcaggctgttgccgatgacgcgcatgtcgcccggattcttgaccgtaccgtcgccgttgttgatgatgttgttgccgtcgaggtcgcggaaacggacgtcgcccgccatgaggtgcgccgccgaagcgtcggagctggtgtagacgcggttgttgaccgccttgtcgttgatctgcgcctgatagcgtgccgcctcctcgtcggtcttgaacagtccgtcggtgcggtagccccagagttcgccgagcgtctcgcccacgtaatggtcggtgagcagcatgtcgtcgttcttatacttggtgatcttggacttgtagtcgcccagcgatgccgaaatgccgtaggagaagggtttgccggccaccatgtggcggtcgcgccagctgacggtgatttcgtagcccttggtgcgcaggtcggcgcagttctccttgggcgagggcgctccgaagacgtcgggcagcgtgagcgacgtggtgagcatgtccttggtgtcgcggatgtagaggtcggccgtgacgttgaggcggtttttgaggaagcccagatcgaaaccgaggttgtaggttacgaccgtctcccacgtaagtccgtcgctgatggggttcgacgccgaggcgtaattggccttttccgtgccgttgaaggtgtagcccagctggccggtcgagatcgtttcgatgtagtagtagttcgacacctgctggttgccgagcgagccgtacgagaagcgcaccttggcgttgtcccaccagttgcgcatcggctcccagaatttctcctccgagatgcgccatccggccgatgccgaggggaagaagccccagcggtcgttggcggcgaagcgcgacgaaccgtcgtagcgtgccgatacttcgaaaaggtacttgccggcgtagtcgtagttcgcacgggcgaaataacccagcgtccggtaggccgtattcgactcgacgcagcgttcgatctcgccctgcgccatgttgatgaagctcagcttctcgctcagcgaccctttctggcggacgctcagtttcgacgagcggaagtcctcgaagttgccgccggctacggccgagaagttgtgcttgccccacgagtggccgtaatcgaggtaggcgttgaccacatggccgttatagtagtagcggtcctcctgatagaagtcgtagatcgaaccgttggtgaaatcgaccacggcggtctgcgtcgcgttccatgtgttggccgtcggataggagcggtaggctccgaggttgtcgcggcggcggtaggtgtagtcggcgttgagtttcagatccttgttgcgcgtgaggtcgaacgtcacccggttggtgatgatgtagtagttgttcttgcgcgagttcttgttgcgtccgtcggcgaatacgccgccgcgtccgctggcgatcggcgagttggcgaactggatgccgttggaataaacgaacgtggtgccgtcggggttgaccggaacgaacgtcgggctgatgttgttggccacgttgaagaggatgccgttggagttgagctcttcggaaccgtcctgctcccagtaaccgccgtatttgtagtcggtcacctccatgctgatgttgttcgagtagtgcatccacggcgttacttcggcggcgatcttcgtgcggaacgagtagccgttgtagatatcctcggcgccatggttgaacaggccttcacggtagaggtagcggccgctgacgtagtagttgatcttgtcgttgccgcccgtgagcgaaatgttgtgctcggtttcgggacggctgcgcttgaacatgtagtcgtaccagtcgaagttgcccagatagcggtatttgccgttgctgtcggtgatgacccacgggcggtcgggatgctcggtcttgtcgttgcggcggtcgtagagcatctgcatctcctcgtccgtgtagttccagcccacatagcctttcgatgggtagcagaattcgttggtgagtttcacgtagtcgtatcccgacgtgatgaagtcggtcgaggtggtgttccacgacacgccgtagcggccgttgtaattgactttcagcgtgccggccttaccgctcttggtggtgatgagcaccacgccggccgaagccttggcgccgtagatcgagcaggccgaagcgtccttgagcaccgataccgattcgatgtcgttggggttgacctgcgccagcgacgcttcgatgccgtcgacgagcaccagcgggctgccactgttgagcgatactgcgccgcggatcttgacgtcgtagttcttgccttcgatcgagccgctgccgagcgtcagcagcagcgacggatcggcgccctgcagggctgcggccgtattggtcacgggacggttgttgaggtccttgccgctgatggtgcccacggcgcccgtgacgttcacgcgcttctgctggccgtagccgaccacgaccacctcgtcgatggccgccgagctttccacgagggtaatgtcgatggcggcgtaggagttgacttcgaccgtccggggctggtagccgatgaacgagatgacgagcttcgccggaagcttgacgttctccagcgagaagtcgccgttgctcatcgtggtggtgccgttgttggtgccgtccacgatgatcgtggcacccggaacgggcagccccagattgtctttcaccacgcctttgagctggttcttatccgcggcgaggctcttcggagctgccttggttacggagatgcttttgcccgtaatcgtgtaggtgatgtcctgatcggcgaagatctgggccagaacctcgtcgatcgacgcgttctgcgccgagatgctgacgcggcgctgcatgtcgacgccggccgatttgatggccacggagtagttctcccgctgattgagggcttcgatggcctccttgaccgttacattcgtgagtttgaggtcgatcgcctgcgccagagccgggctgggaagcgccagcaggcagagtgcgaacaaacccacgatcgcacgcgcatggaaaagtgcggttcgattgtaaagttttttcataggttgaagttttaatgttgtagttttttgttgctgtttcgcggttatttctttcgggatatgtagatcacgtcgttgcgttcgcggatggacatcgatttgtcggtgttgagcgtgccgaggatcttgagcagcgactcgttgttggtgaagaaggcgtagaagcgcacgccggccagttcgggatcggtgatgatgattttctggtcgaagcagcgggccagctgtgcggtgatgccgtcgagcgactcgttgaagaagtagaagccgccgcccgtggcgcgcgatttatagttttcgctctggaaagaggtcatttccagcgctcccgtcaggcggtcgtactgcgcgacgtcgttgcggaccatgacgacctcgtcgtcgcatttgtcgctgttcacgtcgaaacgcacgctgccctcgaccagcgccacttcgaccagctggtcgctgttgtaggcccgcatgttgaatttggtgccgaggacttcgacctcgacgtcgccggccgagatgacgaagggatgccgcttgtcgtgcatgacttcggcgtagacctcgccgtccacgaagattttgcgctggcggccgttgaagtgggtcggataggttacgcgggtgcccgaattgagccacaggagcgttccgtcggcaaggcgcagctcgctgcgctggcccgccggcacgagcacctcctcccattcgggagtgtgcgcgatcttggtgtagaggagcgagacggcgatcagcagcgggacgatcagcacggcggcgatccgctgcgtccaccggacgacggtcgtcagacggcgcggtgcggtgcgcgccggaacggaatggccgatgcggcggcagaactcttcgaacgcagcctgcgccagcgcggggttttcgctccgcacctcgtcgagcagggcgccgagcagccggtcggcttcggacgaattgccgttgtcggcgaaccattgctggatgcggacctcctcgccgtcgttgcagcggccgtagaagtagtcccggactttatctaatgtcggtttgttcatctcttcatgcgttttatcggcagcccgatgctgccggttactacataaagaacaaacgaaagccccgcactacgtaacggggccggaagatttatcggggaaatttcagggcaggatgtccagaaagacgatgatggccggaatgatgttgaggtatttgcgcagctccttcagcgccagctcaagatgcttgtccacggtgcgtaccgacaggttcagttgttcggcgatctccctgctcggcatgtgctcgaaacgcgacatgcggaaaatctgctgccgctgcgggggcatctttccgacgatggtctcgacctgctcggcagtctccgccagatcgagcttctcctcgatctcgttccgcgaaggcaggtttcccccccccttgctttcggtctgcgcgatagcctcctttagggtcgtgaacgtgcggctcttggtgcggaagtagttgtatatctcgtgtttggccagcacgaaaaggtagttgcggatggatttggccgcatccagcttttcgcggttcagccaaactttcatgaagatattctgcgcgatgtcctccgcaacggcggtctctttggtcatgcccttgatgaaggcgaagaacgtcgggtagtatttgtggaacagcacctcgtaacccgcgatgtcgccgcggatgagctgcctgagcaggtcctgctcttgcggatcgcaattgacgaaggtgttataaacggattctttcattatcgggactacgttccggaaacagcatgcctttccctgcagcactcggatctgctctgaaaaaagagggtgggtgcggaagatgctatgacgaagataagcataatctttcgaaaaacaagcggcaatccggggaattaacaccccggtcgccgaattttaacggggctgcaacaattccccgaagatacctatttttatatataaagggccgcgggagtgcgcagtgcggggcggtttatcgggcggtctcttggtcgaagaccgcatcgaaggccgcgcgcagacgggcttcgtcgcggatcagcgcccgcagctcctcctgtttgcgggcgttgtccgattcgggaatccagagccggaggtaaccgccttcggcgtactttttccgcaggtgcgcaagacagcgttcgaagtgtccctcgcggtcgagtgcggggcagtgggacagaccgtactgcaccgtacggcggagcacggtcgcggggtcgatgcagcggtcggcctcggcgacgatgcgtccgtagatcgtgcggggtgcatggtcggacgaggcccggtggtcctcgacggcgtcgcgcatgacggccagctgctctgcggtgaaccagcgccgcagctccgtgtcggcgagcaggatttcgcccgaatggatgtggtgcaactcccggccgcgggccagccccgtgtcgtgataggcggcgacggcgtagatcatgtccgcatcgacgtcgtaatgccgcgccagatcgagactatgggcgatgaccgtgcggacgtggtccgtgccgtgcgccgcgtcgaaggattcgtaacgggggatgatctccgtttcgatatagattctcagctcttcggatggttgcatggtgcaaaaataagcatttggcgggaagtgcggcatcggaaagatattaaaatttttagttttgttcgggcttttcactatctttgcaccggtaaagttagggaaaatgaagtcggaagcggaattgaaagctgtcacgcagttcgttgcggagtatgccacccggctgatggggtccggagtgcatacctcgcgcgtggtgcgcaatacgaagcgtctgggcgaggcgctcggcgtgcgcgtcatggtgtcggcctttcagaaagtggttactttctcggtttatgacgacgagagcggacgggtttacagcgaggtggcggacattccgccgctgccgatcagcttcgagctgaactcggagctaagcgccctgagctgggacgcctgcgacctcagcctgccccttgccgagattcggcgccgctatgacgagatcgtcgcccggcctcgtctggacccgattttcacactgattctcgtcggactggccaacgcatccttctgccggcttttcggcggggagtggtgtgcggtaggcatcgtctttaccgccacgctgctcggattctacctcaagcagcggatgcaggccaagggattcaatcactatgtcatctttatcgcgtcggccttcgcggcttcgatgtacgcttcggtggcgatgattttcgatacgacttcggaggtcgccatcgccacgagcgtgctttacctgattccgggggtgccgcttatcaacggcgtgatcgacatcgtcgaggggcatgtgctgaacggtatcgcccgcctgacgtcggcgctgatgctgatcgtctgcatcgccgtcggattgtcatgtaccctgatgatcgttaaaaacggattgctatgacgctgctcgccattctttcggacggatttttcgccgcggtggcggctgtcggattcggagccgtgtccgatcctccgatgcgggcctttccggcgatcgccctgctggccgccatggggcacgccttgcgtttctgcctgatggacacaggcgtggatatcgcttcggcgtcgctgtgcgcttcggtggcgatcggtatcggaagcctgctgctgggaggccgcatccactgcccgatgacggtgctgttcatccccgcgctgctgccgatgatccccggcatgtatgcctacaagacggtcttttcgatgattatgttcatgcagaatctcgacgatccctccgccgcggggtatctggcggccatcgtccgcaacggattcgttaccttcagcgtgattttcatgctggccgcgggagccgccgcgccgattttcctcttcaacaaacgcgcacattcactgacgcgcaataaaaaacagattcgcagctgattatggaactcttttggcaaactatcgcagactacaatacgatgacttggcccgtgcaggcgctcatcgtgctggcggccgtcgtcctgacggcgcgtctctatctgcgcccgactctccgggtgaaaaccgcaatgaaatgttttctggcgtttctcaatgcgtggatcaccgtcgcctattacctcgtgtcgtgcgatgcgcgggcttacagcggagtcatggcgtttttctggggcgtcatggccgccgtgtggatttatgacgcggtcgtcggttacacgacgttcgaacggacgtacaaacacgacaaattcgcttttgcgctctacctgatgccgttcctctatccgctgatatcccatctgcggggactggatttcccgatgaccacctcgcccgtcatgccctgcacggtggcgatcttcaccatcggactgatgctctcgttctcgaagcggatcaatctgttcgtcgtgctgtttctgtgccattggtcgctgatcggcttttcgaaggtttactttttcggcattcccgaagacctgcttttggcgagcgcgctggtgccggcgctctatctctttttcaaggagtatatcgacgtcaatttccgccgcaacgccaaacccgatctgcgggtgatgaatatgctgcttctggcgatgtgttcgggactcggcgtctttttcgccgcgaccatctggcagcagctcgccggaatggccggataatgccggccgcccgaacgtcttctccggaccggggataaaaaaatccctcctttggtaaggagggatttggggtggagtgtcggaatggccggtaggagctgtcccgccgacatccggttatttcgcgtacgaaacggcgcgggtttcgcggatgacggtgatcttcacctgaccgggataggtcatttcgtcctgaatcttcttggcgatatcgtgcgagagcccttccgattcctgatccgaaagtttgtcggcgccgacgatcacgcgcagttcgcggccggcctgaatggcataggtcttgacgacgccggggtatgacagggcgatgtcctccatctctttcagacgcttgatgtagctctcgaccacctcgcggcgtgcaccggggcgtgcgcccgaaatggcgtcgcagacctgaatgatcggtgcgatcagcgaggtcatctccacctcgtcgtggtgggcgccgatggcgttgcagacttcgggtttctccttgtatttctcggcgagtttcatgccgatgattgcgtgcggcagttccggttcgtcgtcgggcaccttgccgatgtcgtgcagcagacctgcgcggcgcgccgtcttgggattcagacccagctccgcggccatgatgcctgcgaggttcgccgtttcgcgggcgtgctgcagcaggttctggccgtaggacgagcggtatttcattttgccgatcatgcggatcagttcgggatgcaggccatggatgcccaagtcgatcgtggtgcgtttgccgacctcgacgatctcctcctcgatctgtttctggactttggccaccacctcttcgatacgggcagggtggatgcgaccgtcggtcaccagctgatggagcgccagacgtgcgatttcgcggcgcacggggtcgaaaccgctcaggataatggcttcgggcgtgtcgtccacgatgatttcgatgccggttgcggcttccagcgcacggatgttgcggccttcgcggccgatgatgcggcccttgacctcgtcgctttcgatgttgaataccgtcacggcgttttcgatcgccgtctcggtcgccacgcgctggatcgacgctacgatgatgcgcttggcctctttggtggcggtcatcttcgcctcttcgatggtctcgtttatgtagccggcggcttcggtcttggcctcggccttcatgttctcgatcaggatgttcttggcctcctccgagctcaggcccgaaatctgctccagacggacgttctgctcgcgcatcatctgatcgacctcctctttcttgtgttcgaggatctgcagctggttctgcatctgctccttcagccggtcgttttcgcggagtttgttctccagatcgcgctgttggttctgcaggttgttctcgatctgcttggcccgctgttcgctctgcgcgattttctggttgcgttcgttgacctgccggtcgtattcgctcttaagctgtatgaacttctcttttgcctgcaggatccgctccttcttgatcatctcgccttcggcctcggcctccttcagggcggcttcgcggcgcttgcggatcgagttcttggtcacgaggttcgtaacggccatgtagatcccgatcgccgcaatggctgagatgcaggcaactaaaatagtggtatacatgattttgttgctgttttgagttgttattataaagggtttgttgttgcataaaaaaaccgcataggattccttagtcttgtttgacgaatctgcaagataagtcacgtgtgggggctccgacaatcgcaatcgtccaacggtacgccgcagcatacaccccgaagggtcaaggcctgattttgaagcgccgtgagttgccccaatttaaaaagtgttcagtttcgcaaagctgtaaggaatctatgcgggtagattttttccttcgtatgttaaagaacgctgttccggtttcagggcgccgttacgcgcacctgcatgtcgtttatcctttcagggcgttgaggtaggcgtctatctcttcccctaagtgtcccagccgtttcaggtcttcgtcgcccagttcgcggctttgccgcatatcgacgttcgcaatggcgaatttcagcgccgccatagacagatagtcctgatccgtccagttcttgaagttgttttgctttatcgcggcgaggtaactgttcacctcccgttcggccagacggtacatctcctctttttcgctgtcgatattgagcgaatagcttttgcctgccagtttgagtgttatcgcctgttgtgccattgttctcgtttcgtttttcttgctgcctcctgtgcgtcctgcggccttccggagcctctgccgtaacggtggggtcccctcccgctgcggctttgctattcgggccttccgagcagcgcgatgcacttgtccacctcccgcataagacggttgacgcgggcccgcgctttgtcccggttacggcttccgcccgccagcccttctgtcagttgcatgcgtgacaattctccgtcgagttcgcggatccgctcctgcagggtgcggttttcggctttcaggctgtcgcgctgcgccgtcagttccgcacattgatccgacaaccgtttgtggtcgtccatgagctgccggatgcggttctcgatatttattatcacacttttttcggccatcgggtcacgggtaaagtccgttttacatctcaaaggtatgaaaaggaacgctaaaaagcaaattttatttcccggcggcccggccgtagaggtcgtagtcggcggcggaatcgatgcgaacgtcgtagaaacgaccgcgcagaagccgcttttccgatgccggaatcaggatctcctgatccacttcgggcgagtcgtactgcgtgcgtcccacgtagtaatcgccctgccgcgagtcgatcagcacccgctcggtccggccgacgcggcgcaggttgttttcgagcgatattacgttctgaagcgccatgatccgttcgacgcgctgctgtttgacctcttcaggaatgttgtcctgcaatttctgcgccgaataggtgccttcctcctccgaataggcgaagacccccagccgctcgaagcgtacgtcgcgcacgaactcttccagctcggcgaaatcggcctgcgtctcgccgggatagccgaccaagagcgtggtgcgcagcgccagatcggggatggcttcgcgcaggcgtccgatcagcgcataggcgtcggctttggtgtggcgccgctgcatggccgaaagctgggcgtcggagatgtgctggaacggaatgtcgaggtacttgcagattttgggttccgaggccatgacttcgatcacctcgtcggggaatgccgtgggataggcgtagtgcaggcgtatccactcgatgcctccgatgcggcagagccggcgaagcagttcggccagcatccgccggccgtagaggtcgagtccgtagtaggtcgtatcctgcgcgatcacgatcagctccttcacgccgccggccgcgagtttgcgggcttcctcttcgagcctctccatcgggacggagacatgtcctccgcggatgagcggaatggcgcagtagccgcatttccagttgcagccctcggagattttcaggtaggcgtaatgcttcggcgtggtcaggtgccgctcggtctccagcgccgggtcttcgaccgcgcccagcgcccggacgatgccgtcccacgtgcgggcgccgaagaattcgtccacttcgggcagttcggcccgcagctcgtcggcgtagcgttccgagagacagccgacgacgaacagccgttcgatcttgccggcgtttttggccgcggccgcccgcaggatcatgtcgatcgactcctgcttggcgtcgccgatgaatccgcaggtgttgatcacgacgaccttggcgtcggtgcggtcgctgtcgaagagcaccgcgtaacccgccgcggcgagccgggccatcaggtgctcgctgtccacggtgtttttcgaacagcccagcgttatgacgttgatttttttcatgcgtttcgtatttcctccgcaaaggtatggattattcccggatttatcgcaaaaagagcggcgcactttcggtgcgccgctgctgcagggagtcggtgggatactaccacatcacatggatgccgtatgcttcgatgccgttgccgagcgaggtcgaagcgacgtcgacatagccccagaagcgcgagtcggccagcatgaagatcgtataggccgggcctttcacgatttcgcggacctgaatcgcctcgttcgtattcgcggctgcggactgcagcgcgccgagcaggtcgtttttcacggtgccgatcatcagcaggttctgcttcttgtagtggagtccgctcagcacgccgttcttgccgccgaaagcgttgatctggtcggcattttcgaaacgcgccgtgttgaagctgatggcgaatgatacgttggtcgttcccgtgacgttgccgtcctcgtccttgtcggtgcgggtgccgttgagcgtcggtgcgaaacctgtgacgtagcatcccgaaccggagggagtgcccttgacctcggtcgtgggaccgttgaaatagagcatgctgccctgataggagctcttgttggcgatacggttgaatgcgaacgccgtccaacgcttggtgttgagggccgtctgcatcgttttgggctggttggcgccgtcggcgcggtccagcaccgtcagccacgacttgccgcggccttcgagcgtattgaccatgtagttgtcgatggcggcgtaatccgcatcgctgccggccagcgctccgtcggtcagacgcgatacgaactggatttcggctttgaacttgtccgaagggggagcgatcgtctctcccgacttgtactcgtccagaccgttgtcgcagcccgtgaagaccggggcggcaagggcgagcgccagaaaaatggataaatatctcttcgtgtttttcatctctgtacttttttagctgtttgatacgcgcttaattcttcagtacggccgtgcctgcgatggggtagtggtccgaaatgacattgagccggtcgcccttgacgactttgtagtcgctgcagctccatttgccctgcgggaagctgatgaagtagtccaacttgctgtaaccgccgaacgtgccgtcgttgttgcagagccgggtgcccgtcttctcatactcgcggattgcgctggagctgggaccgcagttcatatcgcccatgatcagcacggggatgttttcggcaacggccggagcgatcgcgtgttcgatgacctctttggcctgacccaagcaggtctcgtcgccgccgaaagcgtcgaggtgggtgcagacgatgcgcaccttcaccccttcgggtttggagtcggtcggaaccagaatgtctgcccagcccgccgaacgctggtcggcgccggtgtacatgcccagcagtaccgaagccgaattgacgatcgggtatttcgacagaatgccgttgccgtaggcgccgttgtccttgttgtaggagaagacgaagaacgggaacatgccgagcgactgtgcgcattcggtcagcttctcgaccgaactcatgcgtccggtcgcggtttcgaactcgttgaagcagacgatgtcggggttttcagccttgatcttttccatggcctcggcgatttcgaaatagactgcattggagttgtcgtcgtattcgaacgacttgatgttccactccatgcacttcagcttgacgtcctgtgcctgtgccgacgcggccgggagcatcatgcagagcagtgcgcctgctccgaggatatatttgttgattttcataatcgtttctgttcttaaatatggtttaataacccttgttctgcttcaggtagaccgtgccggtgaatgcccgctgcggaatggggaacaccttgttgtaagtcggattgaaggtgcggcccggataaacttccacctcttcggcaacgatctggccgttgaccttcttcgaaatgacgctgtacagcggcttggcgtaggtcgtcgtggcgatgccccagcggactacgtcgatatggcggctgggctggaactcgaaggccagctcgcagcggcgctcgttcatcagctgggccttggtggcctgactgttctgcggcagacctgcacggtcgcggatctggttgagcagctgcttggcctcggcgtcgccctcgcctttggtccagatcagggcttcggccttcatcagcatcacgtcggcatagcgcagcaggcagcagttgagcgagttccagagtttgtcgcgcagcgcggacacctctttgcccttgcagtcggcgccttcccacggggagatgaacttgcggcagatcagacctgccgatacgtggccggtcgtgtagtccgagacgcttccgtcggtgttgtaaccgccgaaggtgatgtcacggcctacgaatttgacgtgctggcccggatagaggatcgttacgtcgcggcgctggtcgccctcttcgaacgcatcccacaaattcttgctaggcgtgaaatacccccacgtgttgtagaggccccagccagcgttgacgaaagttacgccgtggtagcgggcgccgttggtatagtcgccttccagcgagaagatgtactccttggagtggttctgctccttgcgccagaggttggcgtacgagttgagcttgttcgacggatcgatgtagagttcgcgtttgtccgaaccggtaagcgccatgatcttgttgcacatctccagtacgatgtcgtagtatttcgcgtcgtactgcgctgcatagagggctgcgcgggctgcgtatccccaagctgcggccttgtgcggaagtccgatctgcgaggcgtcgagctgcgaaaggtagggaagcatctcgcctgccgtgcgcatgtcggagatgatctggtcgtagttctgcagtacgtgcgccgggcgcggggagtcgatttcggcggcgggagtcgtgtcgaggataatcggaataccgccgttggtgtcgtcgccgtaatagggaaccatccagagcatcgagaaaccgcggaagaaataggcggtgcctacagcctggtttttgtatccctggtccagcttcatgtcggggaccatcttgatgatgttgttggccttggcgacattctggtacatcacctcccaaacacgcgagacgtcgttgtcgttggacggcgacatgcggaattcgcggatttcatcgaccgacggacgggcgcggccgatcagtatgttgtcgctggcgcattcgagccacatatggccgcggccgcagatctcctcgctccaatagggcgagacgaagtggtaaagggcgtagatagcttggtctacatcctctttggtcttccaagtagcgtctttgccgtaaggctccctgtcgaggaaatcggaacaacccgaaaggcagaaagcgcttatggccagacagaggctgaatatggtttttttcatggtcgtagttgttagaagttgatgtttacaccgaagttaaagaagcgcgacgtgggatagataccgctgtcgagaccgtagttgcctacttcggggtcggtgccggagtagccggtgatggtggccacgttgtcgatgctcagatagacgcggaccgaacccttctccatgccgatgtggcggctgatatgcttgggcagcgtgtaacccagcgtgatgttcttcagacgcaggtagtcgcccttttcgaggaagatgtccgaaaccttgaggtagttgccgttcatgtcgtcactgaggccgagtcgcggatatttgctggtcatgggtttgaaatcccatgtgttgtaaacatcggttgttaggttacccaagtcttgacgaccgttcattcccaactgtttcgtgccgttgtagacataattgcctgcgacgccctgaaacataaaactgaagtcaaaacctttccaatcgagcgatcctccaaaagagtaggtttgtttcggagtataggagcgggataatacgcggtcgttgtcgttgattacgccgtcgccgttggtgtcgatgaaacgcaggtcgccgaccttggcatcgggctgcagcatcttgacctcgccggtgtcgggatccttactgatatgacggtcgatctcgtcctgcgagcggaagataccgtccgtgcggtagatatagtaagagtaccatgggtgtcctgctcctgaagcaaaaagctgaatgccgttgaatgtggggtatttgtgcattacaatgggctgggggccgtagtcctctacataacctttgttggtcgagaaagtgccccagacattgtagttgaacttgccttgtgcggcgctgttccgataggatacggagaactcccatcccttgttgattacgtggcccatattacccagcggcgcattctctacacccatctgcggcggaatcgtgaggtaatcgacgaggtccttcgtttccttgttgtaataatcgacgctgacttcgagcgtgttgtggagcattgtcaggtccagaccggcactggtctggacggtggtctcccagcgtgcgtccgtattggggatggtcgccagataggttccgtaatgggtcgtgccgccgataagcgaaccgtccgggtagatggagagcggaatgctggtcgggttgggcaggttgtagaggtctacgttgccgaccttaccccagcctgcacggaatttcacgaggtcgaagaccttgttgagacctgcattctggaagaatttctccgaggagagtttccacgatcccgaaatggccgggaaccagtcgtagttctttgctgcgggcagtttcgacgatgcgtcgcggcggatgctgccggtgaggaaatagcggtcgtcgaacgaatagccgagacgggcaaggaacgagaccatcgagtagtctactatatcttcgttcgggttcttggtccatgagcctgcggcgccccataccagattgtggtcttcgttggagccgtagccctgcgtgcggaagtcgcggaaatgtagtttcttgtagtcggtggtgaaacccgccatggcgctgatgtggtggcgtccgaagacttgcgcgtaggtagccgtcgtttcccaaagatagtggaagttgttgtagttgaactgctcgcggctcgaagtgctcgatccgcccggcacgtcgatgacgggcgagaattcgtcctcctcgcgcatgtcgaggtcggccgtgaactccgatttcagggtcagcgacgtgatcggcttgatttccagcgaggtggtcgagaatatcttggtgcgcgggtagcggcggtgcatggtttcgagctgggcgacgggattcacgatgttgggaccctcgacgccgctggccatgtcggccgacgaagcgataccgccccatttcggtttgccgtcgtttccgtagacgatgttgccgtttgcgtcgcggtcataaaccgatgcggaagcgggaaaccacatggcgccgtagatggggcccgtgtgcgaggtactgatgttgccctgtccgttggagtattcgaagtttacgcgctccgacaatttcagccatttgaccggcttgaattccgtatggagtttcgcacccagcgcttggctccatgtgttgagcagggtgccttcctttttgtcgtaggttaccgagaggatcgacgagagcgtctcgctgccgccggtaatcgacacggcatagtgctgcgtcagacccgtgcggaagatttcgtcgagccagtcggtgcgggtgacgttggcgcctgcatagacctgcgggttggccagattgggcagcgagctgcccggcgagttctcgacggccttgccccagacgtcgcagaactgctgcgcgttgagcatcgtcgggaggttcatggagcgttcgaagccgaccgatacgttgacgttgacgcgggctttacctgcctgcgcctgacgtgtggtgatcagaattacaccgctcgaacctaccgaagcaccgtaaatggcggccgaggcggcatctttcaggatggtgatcgtctcgatatcttcggccatgtagggagcgccggggacaccgtccacaacgaccagcacgccgtcgcccgaagtcgggccgatattgtcgcggctgtatgcggcgctcttgtccgtgccgtcgtcgttgcccttcgagccgcgaccgcggacggtgaacgacgctttctgcagcgggtcgcccgactgctggatcgtaacgcccggcatgcggccctgcaggagggttccgagatcggcggcgcggctgcgggccgcatcgtccactttgacggtggagacggccatcgagaggtcctctttacgctgcgagccgtaaccgatggcaacgacttcgccgatcatcgtggcgtcttcttccatcgtgacgttgatttccgtgcggttcatgacggccagcgactgcggtttgtagccgatgaacgaaaagtcgatcacgccgtccggtttcacggaaatctggtagcggccgtcggcatcggtggtgacgccgttggtcgtgcccttttctatgaccgaagcgccgatgagcggagtctggctgctgtcggtcagctgtccggacaccgtgacccgatcctgcgcatgggccggaagaatgagtatgctcagcagcagactcatcagaagaaagcggacgaagcccctgttcttctccgaagttgtcaaattcattttcatagagttaaggttaatattaatagtaattgtgtagagaggctcggtaattctcggttttggcagatatttatttaaatattttaaaaataggcgcggttttggtgtcgatttgcagtatgtgcaaaatcgatattcaaaattatgtatctgtaaattgttggtgggcgtggtttgcgtatttgaatcctcaaattgcgtataattgactgccgcgccggaaaaaaccggacgatacatatatacaaaaaagctccggactctgttggggagtccggagcgcggatgtctgtgcttttaatatataggtgtcgttccgatatggccgtccgcctattgtgcggaatcgccggcggcccgtcagctttggccggagccgtcgccgaagagcgccttgacgaactctttgcggtcgaatatgcgcagttggtcgatgccttctccgatgccgatgtaacggaccgggatgtggaactggtcgctgatgccgattaccacgccgcctttggccgtgccgtcgagtttggtgatggtgagcgaagtgacctgcgttgcctgcgtgaactgccgggcctgctcgaaagcgttctgtccggtcgagccgtccagcacgagcatcacctcgtgcggcgcgccggggatcaccttgcccatgacgttgcggattttggtcagctcgttcatcaggttgatcttgttgtggagacggcccgccgtgtcgatcagcaccacgtcggcgccgttggccttggccgaggtcagcgtgtcgaacgccaccgatgccgggtcggaacccatctcctgacggatcatcgtggctcccgcacggtcggcccagaccttgagctggtcgatggcggcggcgcggaacgtgtcggcggcgccgatccagaccttttgtccggctttggtgagctgggccgcgagtttgccgatggtcgtggtctttccggcgccgttgacgcccacgaccatcaccacgtaaggttcgccctctttggcgtcgagtccgaaatgcttttcggagccgtgcgactcctccatcagcgcggttacctcttcgcgcagaatggactgcagctcggaggtgcccatatacttgtcgcgcgccacgcgctcttcgatgccccggatgattttgacggtggtttccacgcctacgtccgacgagataagcacctcttccaagtcgtccagtacgtcggcatcgaccgtcgaacggcctgcaacggcgcgggcgagcttcgagaaaagtcccgtcttggtcttttccagcccggcgttaagctcttcctgctgctgtttgcgctcttcggaagcctgcgcggcggagttgtcctgcttctttttgaaaatatcgaaaaatgccatgtctaatatctctatatccgtacaaagataataagaatgtttggaaaaaaatgttatatttgcactatatacattttcaacgatgatgaaaaaaacgattctgctgcttgtggcagcgctttgcggcgtattgacggccgcggctcaggacctgatcgtcaagaccgatgcgacgaaggtcgaggccaaagtaaccgaaataacacccgatgcagtacggtataagcgtttctccaatcccgacggaccgacctatgtgctgcctgtcgccgatatcgactacattcagtatgccaacggcgaaaaggagcgcttccgggctgccgaaactgtgcctgcgacgccgctgacccctgcgacgccggtcggtgaggctccggtcgcagcggctcccgctgcgcaggcgcctgtacagcaggctgcgccggtgcagtatgtcgccaaagagtatcagatcggcgagttctacgaccagaacggcgtcaagggcgtggtctgcatgctgacggaggaccgccggcacggactgattatttcgctcgatgaaatatacctgccgtggagcgaattccggaagcccgacctgcgggttgcgggcgccgacgaccggatcgacggcatgggaaatatggagaaggtagccgcctatatcgccgaaaacaaccttgcgtgggatgattttccggctttcaagtggtgccgcgacaagggcgagggctggtacctgccggccatcgacgaactgctgaccatcggacacaactacaacggcggcacgcgcatacattccaaccgtcaggcccgcaaccgtttcaacgacgcgctcaaggataacggcggcaagcgcatggaccgtctggtctactatttctcctcgaccgagaaggacgagaaggaagcctatacgacccatacgggcatcgaacctccctatgtgatcgagattcccaagtacaacaaattcctcgtgcgggcggtgcggaagttttagctttcgtcaattaaagaaaaggagtatcctcgatgggtactccttttttgctttaccggcaatcagatgctttcgatcagggcgctcagtttacggacgatgacttcccaactgtaattctgttcgacataagccggtcctttttcgcttatttcgcgtcgcagccgctcatccgtaaagagtttgtgaagctggcggcagaagtccctgcgtcctttgtagtaaagtgccgcgccgctttgctggcaatggtccttcagcacttcgctggctccgtttaccaatacgggaacgcggttttgcatggcttcgagcagcagcagggagagactttcgaaacgcgatggattgatcatcagagttgcgtgccggataatcgcgcttttttcttcttcggaaacgaatcccgtcaaaatgatattcggatcgtcgggatatttgatttccggagacagactcccgaccaaaaccagtttcgactgctgcttgtatgtccggttgtaagtctgaaaatcgggcagcaatgtgtttatcttgccggttgtgacccgtccgagataaagcgcatatttatccggaagattgaatttcgctttgacatgctcccacgctgcggcgggcgcgagttctatgccggtgcctacgatgctgctcggcgccaatcgcggcccgaaaatgcgcaggcatagcctgcgttcggcttcggtgttgaacgcaatatggcgaacctgcgtgaacaaccgggtgtaaatggccgggaaaagccatttttccgggtgtgccatcggaatcagtatgcttttttggggaacctgcagccctgcgaaaatggtctgtgcatggaaatagcacatgggaatgaatgccgcataatcgtcccgatgttcttcgatgtagcgcagcaggtcgggggcgtaggagaccgtcgaatgctggtaggcggtttccttgtcgaagccgagattccagatcgggtgaattgccgcaaggagacgcaacacgccggcttgcgacaaccaatagcggagtctgcggacaggtttggatttctgaagcagccggcggctttccctgccgttgaagccgggatgcggtacaaaccgccggatggttattccgctttcatggctttcgcctgcaggatattggtccgaggggttgttgaagtccttgagcgtcgtggtcaatacctcgacgtcatatttatcccgcagtctttctgcaagcatccggcaatgcacttccgatccgccgttgatgccggctccgtagcgcacgttgataaatgctattttttttcatgggtttacatttcgttgaaaaggctgagccattggttgccgatattttccagatcgtatctgcgggaagcttccagcgcgcgcgtccgcatacgttcctgaagttccgtgtccgcaagcgccgcattcagcagcgcggcgtatttgcgcaggctgtaggagggaaccatgattccgcacgctccgtcgcaggtgatttccctaattccggcataggagtcgaacgataccggaatgacgccgtattgctggccttccatcagactcatgggcagcccttcgaaattagaggtcaggcacatgaatgtcgccctgcggtagaatggcgttacatcggcatgatagccggcgaattcggcccgctgcaaccgtagtcttacggctaatttgcgcaggttctcgtcttcctcgccgcatccgaccagaatcagcttccagtctggattcctgcgttcgacggttttccatattttcagcaggcgatcgacccgtttgtgagctctgtggaagcgtcctacgtacaggacgatcttttctttgggcgatacgggggcggccgccgcaggcaggagcggattgagtatggctccgtatttcgatgcgggagcgtcgcttccgggatggcctgaagccttgagcgcctgcatgaagtcctctttgtattggtcgcagaggagcagcatgcgatccagatggggcatcatgccggcgtacattttctctgtccggtgcaggcgtttgcgggtaatgcggtcgagcggccggcgcaggaacagaaattccagccggcgcagaaatgtcggattggggatttccgtggatttgagttcgcgccatgcgtactcttcccagaagggaatgttgtgcagacagaaaatcatccggcaccgggtcctgcgtttgatctctgcgaacggaatggcatctatgccttggacgatgatgcaatctacgctctcctcttggagagaccggcaaaggaaatcgacgttcgccggttttttcggatcgggtccggccggcagctccctgaattgaaatattgcccgctcttcatcacataataattcgcggttcaacttctcgatatacagaattatgcggtaaccctgtttgtgaaagaaggaggcgagattgtgcgttaccgtttccgctccgccgtatggataaagccaattgaagaaagcgatggtttgcagttgcattgtcgtgtatttttgaccaaagttactcttttcgccctgaaatagcaaacggacatccgaatttgtgcttttcttcggagagtataaatacaaagggcaccctgtcggatgccctttgtatttaagatcgctcttaaaatacttatttcttctcctcgaagaattctttgacttggtcgttggggatgatgccttccttgaacatgtaagcaccggttttgtccgacttgaccatcttgatgcacttcgtaaagttcttacccgtgccggttttcagtgttgcgactactttctttgccatagagcttcaaaactatttaatttcacggtgaacggtgacctttttcagaaacgggttgtatttcttgcgctccagacggtcgggggtgttcttcttgttttttgtcgtgatgtaacgggacattcccggaactccgctctctttctgttcggtgcattcgaggatgacctgaactctgttgcctttctttgccatttgttacttcggtgttttagtaaacggacttaggtgcggcagcctcgcgcagagcgactgcaagacccttcttgttgattgttttcatgccggcagccgataccttcagggtaatccagcggccctcctgctcagaccagaaacgcttggttttcagattgggactgaatttgcgtttggtcttgtggtgcgagtgcgagacgttgtttcccacgatcgccaccttgcctgtgatttcgcaaactttcatttttgttttcgataatattaatattattcccgtaagggagtgcaaatataaggaaaaaatgagaactaaagattcagttgcccgattaatttttaatgctgaatgttattgtgttgatagtcaatgtttaaacgattggaattgtgagcgtgaaacgcgccccttccgtgtaggaagtgtcgagttcgaccccgccgcccaatgcgccggcgatcagccggcagacggcgaagcccagtcccatgccctgcgagaacgggtcgagtttgacgaaacggtcgaagatgcgcccggcttctgcggtggggatgccggggccacggtccgtgaccgtgaaggcgatccgctttttgtacgagatcagggtgtaggcgagcgtgatccggccgtcgggggcgaagcgtgctgcattgcgcagcagttcggtcagggccttggagagcagcaggcaggaggtgttgaccggaagttgtgcgcattcgggttcgaagcggatgtcgagtttgcggaggctgtagtccctgacggtctgaatgcactgcatgcagcagacgttgatgtccaccggacccaatgcgggcggggtgtcggaggattcgaggcctgcgatatagagcacgtcgtccacgagtttctggaggtagccgctgttttcccggatgatctcgatgtaggactgacgcttttcgtcgtccgcgtccggggccgcggccagctcggcgaaacctacgatggaattgagcggggtgttgatctcgtgcgtgatgttgcggatgaagacgcctttcatccggttgctcgcttccgcggcccgtttggcatgcgccagacgacggttcatgcgcgccgtgaagacaagaaagaggaccgtcagcagcaggatgacgctcagcgccgcgatgcccagttgcgtgcggtgcaggcgcacttcctgcgtctgccgctgcagctccgccttttcgacgtcgagacggctgacgtcgagcagcgtggcgaattcgccgaggtttctttcgttgtcgtcgccgacctttttccggtagaggtcgaggtagtgtttctgacttttgtaggcggcttcgtaattgccggtttcggcataggtttccgcacgggtttggaacagttcgtagaaataggtttcgctgtgcccggtctctttgaacaggccgatcagtttgtcgagtgtggtcagcgccctgccgaattcgtgctcggcgaggtcgatggcaagctgcgcttcggtgaggctggccgtcgtaaggtatccgtcgtgtccctgccggatttggtcgaacagcgtgcgggcttcggcgctccggccggtccggctgtagaggatcacctgtttgagtttcagcggccagatgtattcgggcagggtgagccgcgccttgcctttttcgatttcttcggcggcttcttcgtaccgttcggtgtcgatgaggacggtggccagttcggaatagagaatcggcagcgagaatttgttgaggttgttctcttcgatgaagccgatcgccttgcggtagtagtcggcggcggtctccttgagtccgcgggtccggtagatgtggcctaactgcttgtaggcttcggcgatggcgggcttgtagtcgtcctgctcggcctgcgccatgtagcgttccagctcgtactgcgccagcgtgtattgcccgtgtttcgtgtagtagagaataagccgcgaccaagtgaaaaaatagtaggtcggctgcttgtttgcgcgtgcgaaggcctgcacgcggggaatccacgccttgagggaatccagttcgttgttgaagtaatagtggtcggccttgaacgagagggcgacggcctgcatgcggatgtcgttcttttcgcccgccagccggaacagcgtgtcggccttgagcaggacgaccgaatcgcggatgttgttgttgcaccagcggtaataggcgtaaagcgtgctgtctacgtttttgtaggtttcggtctgcgcgtggccggacggaatccgggtaaacagcatcaataaaagcagggcttttttcattagtttttgagctgaatagttgcaaagatatgtaaatatatgctataaagcaaactattcagtctattgatagggctaattagcctgatttgccgcccgcaattcttcttcgagcagttcgatggccgccgttccggctttccggatgacggcgtttcggctgccgccggcacgaatcaggcgggtcgtggtgcgcagcggggagctgacggcgatccataccgagccgacgggatattcgggcgttccgcccgtagggcctgcgatgccggtcgtggcgacggcatagtgcgaattcgaagcccggcgtacgccttcggccatctgacggacgacctgctcgctgacggcgccgtagcgggcgatcgtgtcgcagctgatttgcaggatctcctgcttggtgtcgaggctgtatgccacgacgccgcatttgaagtaggccgaagcgccgggcagggccgtaaagcgcgcggcgatcgtgccgcccgtacaactctcggcgacggccagcgtctggatgcggtcggtcaggatgcggtgcacccgtttttccggagcgtggctgctgcaggcggtcagcgagagaatgaatgcggttgcggttgagagcaggattttattcatcggggcgtcttttattttccgttgagttcgtcgcgcagcagaccgagggcgaaggcgccggcgcggtcgatgatctgtccgcggtcggagccgcactgtttgagcagggcgaccgtgcggcgggggcctgcgacggcgatccataccgtgccgacgggcttttcggccgtaccgcccgcggggcctgcgatgccggtggtcgagacggcgtagtcggcgccgctgatgcgtcgcgccccttcggccatctgtcgggcgacctgttcgctgacggcgccgtaacgggcgatcgtgtcgggatcgactcccagcacagcctgcttcgacgcgttgctgtacgaaaccacgccgcagaggaagtaggctgaagcgcccggcatggccgtaaagcgcgcggcgatggtgccgcccgtgcagctctcggctgtggcgagggtctgtcgccgttcggtgagcagcttgtgtatcaactcctgcatggtggccgtttcgtagccgatgatgttgtggggaatgatcctgcgcagcgcttcgaactgccgttcgatctccttcgatacgctttctccctcgacctcgtaggctgacagccggagccgcacggcgcccggattgggcaggtaggccagcttcaggtagggcggcagggcgttttcccacgtttcgatcgctttggcgagcatcgattcgggcagtccggcggtgatcatcgtgcggtgtacgatctggcgcagttcgaagtgcgccttgagccgcggcatgacctcgtcctgcatcagatgctccatttcgtagggtacgcccggcagcgagacgaccactttgccgccgcgttcgaaccacatgcccggcgccgtgccgtgcgcgttgaacaacaccgtgcagcaggccggaaccagagcctgtccgcggttgaggtcgttgaattcgatgccccgctcttcgagcatccgttttacatggtcggagacggtttggttcaggatgagttcgctgccgaacatttcggccagcgtctttttggtgatgtcgtccttggtggggccgagtccgccggtgatgattgcgatgtccgactggccgagggcgcgttccacgcacccgacgatctgcgcgctgtcatcgccgatcgagactttttcatgcacgacgatgcctgcggcgttgaggtggcgggcgatggatacggaattggtatccacgatctgaccgatgaggatttcatcgccgatagtgatgatcgttgctttcataagcggtgtttttgactcaggactccggctgttctgctccggcttgctctgcggaaagctgttttgtcgcgggctgttccgccgcagcctgctgcactgcgggctgttctgctgtcgcctgcgccgctgcggccttttccgctgcggctttcgcttcggcgtcggcgacgagggcgcggcagatgtcacgcaccagtccgggaccgttgtagatatagccggtgtagagctgcaacaggtcggctccggcgtcgagcatcgctttcgcgtcgtcgggggtcatgatgccgcccacgccgatgatcggaaaattgccgcccgaacgggtgtggatgcggcgcacgacctccacggcccgctgcgtgagcggtgcgccgctcagccggccgctgccgatcttgtcgagcgtcgtgcggctggtgtgcagcccttcgcggttgtgcgtgccgttggtcgccacgatgccgtcgaggggcgtttcgagcagaatgtcgctgatttcgtcgatcacggcgtccggcatgtcgggcgataccttgagcatgatcgggcggtattggttctgtccccggcggaagtcgaacagcgggtcgagaatccgcaggatatgttcgcgcgtatgcgtcgcgccttcgcggcacgagttgtcgcagctgatgttcacagtgaagtaatccgcgtactggtagaggttgcggaagagtttgaggtagtcggccgcggcgttttcggcgagggtagcggtgttgcggccgatgttgcagccgacgatgaatccttcgtggggccggcgcaggtgctggatggtcttttcgagaccgcggttcgaaagcccgatgcggttgatgatcgcctcgtccttcgggagccggaagacgcgggggcgggggttgcccgcctgcgggcgcggcgtcacggtgccgacttcgacgaatccgaaaccgagggccgccagttcgcggaacgcctcgccgttgcggtcgaaacctgcggccagcccgacggggttggcgaatttgatgccgaagacctcgcgttcgagcgcggggtgttccacggcgtaacacttgcggagcagccaccgtccgccgggaatcagcccgatggcgcgcagcagtatcagtacgacgcggtgcgcccgctcgatggtgagcgagaagaggatgggctttatgatgctacggtacatggtctcaagtggcggtttcgcttatggccgcaaaggtactaaaaaagaattgatttcgctaaaagtattcgcggcggtagcggtaatggtcgcgcatcggctcgaaatcctccggccgggccttcaggctgcggctctgggcctcgatgtcgaacgcgcccccgatggtggtgcaaagctcctgccacgaaatcggccggggcgtcgaaggggcggcctgaggcgggtaccatccggcgaggggcaggccgaagaaacgggccagcgtatcgaccgacatggccgtggcattggctttgccctgctcggaatagcccgcgatgtgcggcgtggcgagcagtgtgcgggtgagcagccggcggtcgatggcgggttcgtgctcccagacgtcgagtacgcaggcaaggccacttcgcagcagggccgcgccgtccacgacctcgccgcgcgaggagttcaggattacggcgccgggtttcatccgtgcaaaaagggcgtcgccggccatgcggcgcgtcgtgtcgtcgagcggcgtgtggaacgtcaggatgtcggcttggcgggcgacctcctccagcggcaggaagccgcagtgttcgcgcgcctcgcgcggcgggtcgcagcagaggacccggaaaccccatgtttcggcatactccttcacgagcgatccgacgtgtcccacgccgacgacgcccagcgtacgcccggcgggctgccagccctgcgtgcgggcgaggtgggccagcaccgcccccgcccattggagtacgcctctggcgttgcagccggcggccgtgcagacgcggatgccgtgcgccgcgcaccacgccgtgtcgatgtggtcgaaaccgatggtcgccgtggcgatcagacggacgcgggagccgccgagcagccgctcgtcgcagcgggtgcgcgtgcggataaggagggcgtcggcgtcgcgcacctcctccggcgcgatttccgcccccggaagataacgcacctcggcccacggttcgaggaccccctgcaggaagggtatggcgctgtcggcgatgattttcatggctgatggctttttcctgatttctactctttacgggaagcaaatatagggaaaaattaaaatttttgtacctttgacatttaaaacggatcttatggaacagaaaacgttcgatcccgacggggtcggtgtggataacgggacctatttcgggctgcctttcgaaccggagacggccgagctggtgatcgtctcggcgccttgggacgtgacggtatcctacggggcggggacggcttacgctcccgatgccattatcgaggcctcgacgcagctcgatttccacgaaccgctggctcccggcgcatggcgccgcggcatcgccacggccgacgtggactattcgctgctggacgaatcgcagcgcctgcgcggcgatgcggcgaaggtgatcgacctcctcgaagggggcggcagtcctgaggacgactatgtggtgcgcaaaatctgccgcgtgaacgaagggtgtgcggccatgaacgccaatatcggggcgcaggccgcgcgctggctcgatgcgggaaaactcgtcgggctggtcggcggcgaccattcgacgccttacggcctgatccgcgcgctcggcgagcggcatgcggagttcggaatcctgcatatcgacgcccactgcgacctgcgggacgcctacgaggggttcgagttttcgcacgcttcgatcatgttcaacgtgctgcgcgacgtgcctgcggtgacgaagatcgcccaagtcgccgtgcgcgacttcagcgagcgggaggcggcgctggccgcgtcgtcgggccgtgtcgtcctgttcgacgatctgtcgctggcggccgccgggtttcgcggcgaaacgtgggatgcgcagtgtctgcgtatcgtcgaaacgcttccgcaggaggtctacgtgagtttcgacatcgacggactctcctacgagaactgtccccacacggggactcccgtcgcgggcggactgggtttcaaccaagccgtctggctgctggacaccctcgtgcgttcgggccgccgcatcgtcgggttcgacgtggtggaggtcactccggcccgcgaggagcggatcgacgccataacgggcgcacgggtattgtggaagttgtgtaatttaactttaaaatcaaacgttcgataaatgcgactattttcgatgtaccgctgggtgcgcgagcgccacatgatcggtatacgcggccgtaatttcatggaggccccttgggccgggggcatcgtgctgctcggatgcgtgatcatcgccatgctgctggccaatctgcctgcgacttcgctctattaccgtcatctgctggagaccgacctttcgctgatggtgcatagccccgacgggctgatcgactgggtgttcccgcgcgggatgaccgtcgagaaactgatcaacgacggcctgatggtgattttcttcttcgccgtggggcttgagataaaacgcgagatcgtctgcggacagctttcgtcggccaaaaaggccctcctcccggtgctggccgcggcgggcggcatgctcttcccggcgatcatcttcaccgccttcaaccacggtacgatggccgccaacggctggggtattccgaccgccaccgacatcgccttcgccatcggcatcctctcgatgctcggcgaccgggtccccgtgtcgctcaagatattcctcacggcgctggctatcgccgacgacctcggagccattctggtcatcgcgctcttctacggcgggcaggtgcagatcggatgtctgctggcggcgctggccatcatgctcggcgtctacttcatgaaggagatgggcgagaagcgcatgttcttctatctggtgccggccgtggtggtgtgggggctgttctactattcgggcgtccactcgaccatttcgggcgtggcgatggccatgctgattccgatgacgccacgctacagcaaagagtatttcgtgcacaagatgcgccatctgaaggcgctgatgctcgccgccggcacttcgggcgacgatttccccaacgaaaaccaccggttctacctgcgccgcatgcgtaatctcgcggccgactcggtgggcatgagctaccggctggagcatgcgctggcgccttcagtgaccttcctcgtgatgccgattttcgcgctggcgaacgccggggtcgagatatcgtcgctcgaatacctcaatattttccatatgtcgcccgatatcggatcggtggggatgggcgtcttcttcggactgctcgtgggaaaaccgctgggcatatttcttgcgagctggggcgccgtgaagtcggggctggccgaactgcccgaaggggcgacgtggcgcatgctcttcgccgtggggtgtctgggcggtatcggattcacgatgtcgctgttcgtcgatgcgctggcctacaccgaacccgacctgatcgaccggggcaaaatcgcgatcctgatgggctcgacggccgccgccgtcgcgggcagcctgctgatactgattttttcgaaaaaacgaacctgatatgcgtaagacattagttgtcctcatggctgcggcgttgctggccggggcctgctccaaaaagacgggcgggggcgtgaagctcaagaccgacaccgattcggtggcctatgtgatcggcatgaacgtgggcatgaacctgatgaagatggattcgacgatcaacgtgaacgccgtatgcgaaggcatccgcgacgtgttccgccaagggaccagattctcggctgccgacgccgaggttttctacctgcgctatatgaattacgcgctgccggagaaagcccgcgcctacgaggagcagttcctgcaggatattctcaaggccaaccgcaactacgcccgcaccgcatcgggcgtgacctatacggtcgaggtgctgggcgatcaggagcagatacccgcttcggaccgcgacagcatcgcgctccgctacctgatccgcactgccgacggacaggaagtctactcatcctacgagcggggcgatacgctgcgcacgacgctcggcggcctgctcaagggcatgaaggagagcgtcaaactggtcggcaggggcggaaagatcaacgcgtggattccctcctcggcggcttacggaacgcagggcgacaaagagctgggaattcagccgaataccacgctgtactacgaaatcgagcttgtcgatgtcgataaatatgcgaattggtcgcggcgcagcaatttacgccgttaattttaaaccattattccaaatattttataactttgcgcaggtaaacccctaacaggcacaaacgattaaacatatttgaaaaacaaaacaatgaaaaaaattctttttgcagcggcacttgcaggtgctgcgttcatgactgcctgcggcggcaaggacggcggcgttcgtatgggcagcctttcggatttcgactcgctttcgtattcgctgggcgccaatatcggctacggcatgaatcacgagatgagggacattccctttgatttcaaggccatcgacaaaggtatcaaggagggcgccatgggtaaggccacgcaggagcatgacaagtcgctcgacatgctgcgtgagtatttcatgagcaagcgcggcgagcgtgcgcaggagatcgcgaccaagcgtgccgagcaggacagcatccgtctggctggcggcgacacgaccaaggtcgagtatcccgcagccgatcccgccatgttcgagagcgaggaggagcgtgccgagatttcgtatgcgttcggtaacgacatcggttacaacatcagccagagcggcatgcccattcagctcgtatggatcggtcaggccatgcaggacgtgcgcgacggcaaggcgaagatggccgaggatgccgtgaaccagtatctgcagtactacttcatggtgaagcgtccggccgagaacgctgaggcttcgaaggcgtggctggagaagatcgagaagaagtcgggcgtgaagaagaccgagtcggggctgctttacaaggttaccaagcagggcgacgcttcgatgatgccgaaggatccgcgcgacgtggtgaaagtgcattacacgggccgcacgcgtgaaggcaaggtcttcgatacttcgaagttcgcaaaccgctcgaaagagcagcaggagatgatgcgcaagcagaatcctgacggtttcaacgaggacggcacgccgaaagaggccgatacggaggctgaattcccgctcaaccgtgtgatcaaaggctggaccgagggtctgcagctggtaggcaagggcggcacgattatgctctggattcccgccgatctggcttacggcccgcgtggcgccggccgcgacatcggccccaacgaggcgcttgagttcgaggtggagctgatcgacgtcgttcctttcgaggaacccgctccggcggattcgacggccacggccgagactcctgaggcagctcccgcgaaataagcaggtgtgattccgaatatgacagggcggaccccgtgcggggtccgccctgtttgtcattgtgccggcattgggaggaggcgtccgctgcggccgctgttataataggtatgtcatcggggtaaaacggattccgtccgtgacgcgttcggcgtcggttgcggtgaatcccagtctgcggtatatttcgacggcatagggcgacgagttgacggtgatgcgggaaaccgccggatcggtgcggcagaagtcgcgtactgcgctgaacaaggcgcgggcgatgccctgccggtgacaggatgcgtccacgaagagcaggcttatgtggctacggtttctgaccgcggcgacgccggccagcgtatcctgccggaatgctccccatagcatcagcgcgccggtgcgaaactgttccgtcagagcttccggggcaatgaaccggtgaaagacgtcgatgccttcctgcgcgtaatcaggggcttcgaattctgcgaaaacgcggcggacgagcgcggaagccgccgggatttccgcttcgcggagcggtcggatgtcggttgcaggcgggggtgtcgtgtcgggaacgatcggtttcatgggagtgattttgaaatgaaaaaggcggctggagatcccagccgccttgtatgttttccgtccgttttagaacggcaggtcgtccacctcggcgggcgacgatgcataagagggttcctcggcgatgggcggcatgtcgggcatcgggcctgcgccgggaacttcggcctgtttgggctggaggcgccatgcgcggatgtcggtgtaccagcggccgttgtattcgcgcgactcgatattgaccgagacggtgtaggccgcaccctctttcagacgggccacgtcgtcgggcttgttgaaaaacgtgacgcagatcttgcgggcgaacgaaccttcgttcatctcgaagaccacgtcctgacgctgccattcgccgcgtgccgacgttccttttgtcacgggcattattttgtaaactgttccttcgaattccatggtgatgctgtgaatggattaataatcttattttccgcaaaggtaacaaaaaatcgggagaatcgccgcacctgccggcaaaattcccgcgcaaatttctcggccggggagtttcggggcgccgcgatttttttgtgttttgcgtcgccggacgggaaaaactgcgcaggcgtgtgcccggagaattctatggatgccgaaatcggggattccacacgtgccgattggctgttcggtcggatgtgtccttcaaataagacaaaaaagacctgcatttctgcagatctttgattttcagtggacccagaggggcatgatcccacgaccttcggattatgagtccgctgctctaaccgactgagctatgggtccgtccggcggctgtgtgcccaaaccgcgggcacaaatatagcaaaacaaatccgaattcccaatatgacgcggagattttttaggtccgggcaagccgcggcgggggcttactgacggtcgaaaatgtcgttgaggaccttggccagccggtagccggctttggcgagctgctcttcggccagcggtttgtatttcaggatgaagtcgtgtcccagtttgtcgcccggcttcacgtcgtagatacatttcgagtttgctgccgattcgcggccccagtcgtagatgtcgccggcgatcgccgcccgctgctgttcttcggtgtagcggtcgagcaggaaggccagatcggagaagctccaagggtgggtcgtcgctacgatcggggtgtcccagatcgtgtggtagcggatttcgctgcccttgaggacgacgttgaaatagccgatttcctggttgtccggccagcggacgtgtccggggcagtgcatgtcccccagacagtggacgatgacctgaatgcaggccagccgcgtggagtcgttcatctcgtgcatgcggtttttcagccggtcggcagcccgctcgacgtaatagaggcagttggccagatatttgtcgccgggcagcctgttgccgcggattacctcgccgctttcgtccaccgagaaggtgtggggcagcatgtgcatgcggggaccgttggtgggcgtatagcccagatcgacgagcatttggggcttgtaatcgtccatccacgaagcgtaatagacgatcgagcggccgtcgagcagtttgtccagattggctttggcctttttcgtcaggtgttgctcggccagacgggcgacggcggcgtgtcccagcctgccccatgcgaaggcgccctgagcggacgtcagtgcggcgaaggccgcgatgagaaggagtctcttcatgttttaaggtgttttgttgttttttctttccggcccatgcgcggcgcggacgtttgtcataatataataccgtgctgcgggacgaaacacctatccggcggcgggaaattttcgggatattttgtcgcgggcctttgggagcctttctgcgggctgtttttatccgtccggcgcggttttcggcgcgaggcgttttcgctgcggaagcagtgcggagataaaaagtttcgcggaaaatcgggcggagtattgtttgttgcaaataaattcgtacctttgtcccgcttaagcaatcaattaaaacaaaaacaacgaaatgaaaaagggtattcatccggagaattatcgtttggtggcgttcaaggacatgtccaacgaccacgtgtttttgtgtcggtccgccgtttcgacaaaagagaccatcgaagtgaacggcgaaacctatcccgtgtataagatggaaatttccaacacgtcgcacccgttttacaccggtaagatgaagttggtagacaccgccggtcgcgtcgataagtttatgagccgttacgcaaaacgctacgataagaaaggcgcgaaataggcgctttccgcattgagagacaacgggctgcacttgtgtgcggcccgtttgtttttggtgcgttttgttgcagagagagctattttgcggtcgagggaatgtctgcgtggaggaacggtcctgcggttgagggcgtgtttggcggttgtaggaacgtttctgcggccggggtgcggatatgccggggaaggaccggcggtgcggccggaattttcgttctggggccgatttttttgtacacgatatcgtttttatgtatatatttgccgccgtaaggcaaacaatgacttaaacgttagaaagttatgaagcatgtaattgtcatggcgctgggggctgcgctggctctggcgtcgtgtgtgagcaaagggacggtcgtcaaggtcgaggagcagcgcgattcgctttcggtggtcgtcagcgcgaaggattcgctgatcagtgctgttttcgaggacatcagttctatttccgagaatcttgcgctgatcaggacgcgtgagaatctgctctcggtggcgggcgacgccgaaggcggccgccgtcccgtggaggagatcaacaacgatatcgccgccatcgaccggctgctgcgggaaaacaaagtcaagatcgcttcgctgcaaagcgctgtcgcgcagttgcgcaaagccaatctgcgcctcgacggactggagaagatgattcgggacatgagcgcgcagcttgccgagaagaaaaacgaaattgcccggctgcgggagaatctcacccagatgggggtcgaggtggagaccctgaccgagcaggtggctgtgcggagcgagcaggtcgaaaccctgaataccgagaaggtcgagctggagaaccagctgaatacggtgtattacatcgtcgggaccgagaaagagctgcgtgaggcgcagatcatcaacaagcagggtttcatcgggcgtacgctgacggtcaataagaccaataatctggacagcttcaccaagaccgattcgcggctgctgtcggaggtgccgatcgggcagaaaaaggtttcggtcgtgacgacgcatcccgaagagtcgtacgagttggtgacggatgccgacaaggtcgtgttgaaactgctcatcaccgatcccgtccgtttttgggagtcgtcgaagattctgatcataagctataaataacgggcggcgggccggatgatccggcgccgcgcggcaatgagagaggcatcccggaatattccgggatgcctctctcgtttggcgagcgagtgagttcagcaaggaaaccgagatggggcggataatggatgtattttgtcagagacgggcggtgtatggcatgccggacacgttttttgattcggatcggaatggagacgaaccgttatttgcgatgcgcggtgttctgttttgtcatttttattttttttacgtacatttggacaataaaaaatatacatagttgtaatatggattatcaaatcaaaccgcagtttgtggaggccggtttgaaagagaattgccctgcggattgtagtagttgtcctacgtttcctgcgccgtttcgccgcataggcgattcgaattactgccgtttcgcgcaaatttctttttcagcaggagaaggggtgacttttcccgcagaccgcatggtgcgcattcttttcgtgatgtcgggttcgctgatgatggagcatggggatacggtgcggcttgtgacgtcgaaacaatacgtatgtctggcgaggggcgaacgtttcgtcaccacggcgcaggacgacgcccatgtcgtcgtgctatcgctgattcaccgcatcgagttctgcgaacaggatatcttcgataaggtgatgccctacgatacggtcatcccgaccgaagcagtgccgcggctttcgatgcatcctacgatcgaacgcctgctctgcgatctgttcgccgttccggagctgagcgagtgcgcccgttaccacaaaatgaaggctacggagcttttcatgatgatcaaggtgctgtataccccgacggagcatgcttatttcttccagtcgatgattcagccgcaggataacttccgcgtgttcgtgtgcaacaattacgacaaggcgcagggcgtggcggagctggccgcgcttgcgggcatgagcctttcggtcttcaagcgccgcttcgccgagcacttcaacgacagcgtctatcattggatgatgcgccagaaggcgctgaagatctttacggatatccgcgacggcgaggacagcacgaaggtgctgatgaacaagtatggattccgccattatacgcagttcagccggttctgcaagaattacctgcaggcgacgcccgcgcagctgatcgcatccataaaggaggggtagtaggggatttgtcccgtaccgtccgcagacggagagcatatgccggcagcttgggtttgttgtcggattgtggaaacggagaggctgtgggcttctccgcttctttttcagcgctccagcaggtagacgttcagatcgacgaactccccgtcggcaagtcgttctccccggacttccacccggtcgagcgcgaatccgagccgctggggaatgcggttgctacggtagttgcccagtgcgcagcgtatttcgatgcgttccatgcccatctcttcgaaagcgagccggcagagcgcctgcacggcggacgtcatgatcccccggccctgaaactcgctgcggagccagtagccgatttcgatggtgcgcgtcgtgctgtccgccgatttgaagccgatcagtcctgcgaacgcatctccgctccggatcgtgaagaccgggtttgccgtgtcgttcagcatccctgcgacgacctcctgtgtttgctccacgcggtgcgtcgccgccacgaacgggagccagcgtccgaggtgttcgcgctgggtgtctatggcgccgaaaatcgcaggggcgtccccgctgcgcagcgaacgcagcgagaagtcgtcgaaaagcggaatcgttttcatggtatatgccggttttgggagcaaaggtaatgaaaaatctgggatgctgtttttttatatattaaataggtgtcggagcgtttttgcacctgcaattcctgtggtttcggagcgtgcaggggcggaacggtaataaccttgggtgcggagggtgatattttttgcagaagctgttgtaaaatataaaacttttcctatctttgcacccgatttcacccctgtaaaaaaggcggtagaccgacgttctttgagaagagtaaaaaagtgaaaaatttattggaaataatttggccggtaaattttttatgcctacttttgcaatccaaaacggttgattttgccgatgtagctcagttggccagagcagctgatttgtaatcagctggtcgggggttcgaatccctccatcggctcggacagccgatgcgagagaagcggaaagacgaaggtcttccggaacacgagcagcggcgcaacgaaagcctcacggggaagacccgcgcaaaaagcgagccgatctttcaggggcagacaacttgggaagttaccagagtggccaaatggggcagactgtaaatctgctggcttacgccttcggtggttcgaatccatcacttcccactaagaaagagtgccggttggagttgcaagatcttcggcggtgtccgatcgacggacggcgcggaggaaagggtagactctgatacggtatatttttgcggaagtagctcagttgatagagcatcagccttccaagctgagggtcgcgagtttgagcctcgtcttccgctcaagacgcagaagcgtgtgatacggacgtctcctatcggttgataggggagtttgtgtcgcccgctcgttctgcgaaatgaatttttaaaactttaaagcaatttttaacaatactttaaatacttaatactatggcaaaagaaaaattcgaccgttcgaaaccgcatgtgaacatcggtaccatcggacacgttgaccacggtaagaccacccttaccgctgctatcacgaccgttctggctaagaaaggtctgtcggagcttcgttcgttcgactccatcgacaacgctcctgaggagaaagagcgtggtatcacgatcaacacctcgcacgttgagtaccagacggccaaccgccactatgctcacgtagactgccccggacacgccgactatgtgaagaacatggttaccggtgccgctcagatggacggtgccattctggtagttgccgcaacggacggcccgatgccccagaccaacgagcacgtgctgctcgcccgtcaggtgaacgttccccgcatcgttgttttcttgaacaagtgcgacatggtggacgaccccgaaatgctcgacctcgtcgagatggaggttcgcgacctgctttcgaaatacgaatatgacggcgacaacgctcccgttatccgcggttccgcactcggcggcctgaacggcgagccggcatgggaggacaagatcatggagctgatgaacgctgttgacgagtatattccgatcccgcagcgtgagaacgagaagccgttcctgatgcctgtcgaggacgtgttctcgatcaccggccgcggtaccgttgtaacgggccgtatcgagaccggtatcatccacgtaggcgatcccgtcgagatcgtaggtcttgaggagaagaccctgacttcgacctgtacgggcgtcgagatgttccgcaagctgctcgacgagggcgaggccggcgacaacgtaggtctgctgctccgcggtatcgacaagaaagaggttaagcgcggtatggtagtcgctaaacccggctcgatcaccccgcacaccgagttcgaggctgaggtctacatcctgaagaaggaagagggtggccgtcacacgccgttccacaacaactatcgtccccagttctatctgcgtacgatggacgtgaccggtgaggttcacctgcccgcaggcgtagacatggttatgcccggcgaccacgtgaccatcaccgtgaagctgatctacccggtagctatcaacgaaggtctgcgtttcgcaatccgcgagggtggccgtacggtaggtgcaggtcagatcctgaagatcgtgaaataattttcacaacccatagggaagcggtgttccgcaccgcttcccgcttttaggagcatagttcaagggtagaatagcggtctccaaaaccgttgatgggagttcgaatctctctgctcctgccaaagagtaaaagaaaaaaagtatgttcaattacgttaaagaatcctacaacgagcttgtaaacaaggtgacgtggcccacgtttccccagctccaaagctctacgatcgtcgtgatggtggcttcggtcattttcgccattgtcgtgctggctatggacctgacgttcgagaacctgatggccgtcatttacaagacactgggtaatcttggccgttaattgttgctgaaacgatgagcgagattaagaagcagtggtatgtcgtccgggctatcggcggtaaggaaaacaaggtcaaagagtatatcgaggccgaaatccgccataataatctggaggagtacatatctcaggtgctgattcccaccgaaaaggtatacaccatccgcaacggaaagaaagtctccaaggagaaggtttcttatccgggctacgtattggtggaggccgcgtttgtaggtcagattccgattataattcgtaacactcccaatgtgctgggtttcctcggcgataccaaggaagacagtcgcaagatgaatgccacgccgctgcgtccgcaggaggtggcccgcatcctcggccgcgtcgatgagatgaacgccatggaggaggagaacgaaataccattctttgtcggcgagaccgtcaaggtcaccgatggccctttctcaagcttccagggtaccatcgaggccgtcgacaacgagcgcaagaaactcacggtatcggtgaagatattcgggcgcaagactcctatggagttgggtttcacacaagtagaaaaagaataattaaccaaggaaaactatggcaaaagaggttgctgcatttattaaattgcagatcaaaggtggtgccgccaatccttcgcccccggttggtcccgcattgggttctaagggagtcaatatcatggacttctgtaagcagttcaatgcgcgtacccaggacaaggcagggaaggttctcccggtcatcatcacggtttacagcgataagtcgttcgactttgttgtaaaacagccgcctgtagctattcagctcaaggaagcagccaaagtgcagaagggttccgcacagcctaaccgcgacaaggtcggtcaggtgacgtgggatcaggtgcgcgagatcgctcaggacaaaatgcctgacatgaactgctttaccttagaggctgctatgcgtatgatcgctggtaccgctcgcagtatgggtatcaacgtcgtcggtgaatttcctaatatgtaatcgaagatgagtaagttgacaaaaaatcaaaagatcgcctacgccaaggtggaagccaataaggcttacaagctctcggaggctgccgctcttctgaaggagattacgttcacgaaattcgacgcttcggttgatatcgacgtgcgtctgggagtcgatccccgcaaggccaatcagatggtccgcggcgttgtgacgctgccccacggtacgggtaagcaggtgcgcgtgctggtgctctgtactcctgagaaggaggctgaggctcaggctgccggcgccgattacgtaggtttggacgagtttgttgataagatcaagggcggctggaccgacgttgacgttatcatctgcacgccgaacgtaatgggcaaggttggtgcgctgggccgtattctgggtccccgcggcctgatgcctaaccccaagaccggtacggttacgatggaggtgggcaaagccgttcaggaagtgaaatcgggtaagatcgacttcaaggtcgacaaattcggtatcattcacacttcggtaggtaaggtttcgttctcggccgatcagatcgtggacaacgcgaaagaggtgctgaacatgattctcaaactgaaaccggctgctgcgaaaggttcttatgtgaagagtatttatctctcgaccacgatgagtcccggcttgcagattgattccaaatcagtagaaaccaaataagaaggaggagagaagagatgacaaaggaagaaaaactggtcgttattaacgccattgccgagcagctccaagcttatcctcacttctatatcgccgacatcgcggcgcttgacgcagagcagaccgctgccctgcgccgcaagtgcttcgaaaacgacgtcaaactggtagtcgtgaagaacacgctgctgggcaaggcgctggagaaggtggagaaggctgacgctgatctggtaaaagtattggagggtccgacctcgattatgttcgccaacgttgcgaaggctcctgcggtcctgatcaaggaattccgcaagaagtccgacaaacccgttctgaaagcggctttcgccgagggatgcgtttacgtgggcgacgatcagctggacgctctgtgtaacatcaagtcgaaggaggagcttatcggcgatatcatcgcactgctccagtctcctgcgaagaatgttatttctgcattgcaggctaatgcaggccaaaagattgcgggcatcgtgaagacgctcgaatcgagaaacaactaatcacaatcaagaattaaacaaaatttaataagcttacaactatggcagacgtaaagaaacttgctgaagaactggtaaacctcaaggttaccgaggtaaacgaattggctaccatcctcaaggaggagtatggcattgaaccggctgctgccgctgttgccgttgcagctcccgctgctggcgcaggcgaggctgctgccgccgagaagtcgactttcgacgtgattctgaagaccgccggtcaggcaaaacttcaggttatcaaggtcgttaaggacctcgctggtctttcgctgggcgacgctaaagctctcgttgacggcgctcccaaggctgttaaagagggtgtctccaaggaagaggccgagtcgatcaaggctcagcttgaggaggctggtgctgaagttgagcttaagtagcattgctgcttaagtcgtttcagacgattcaggtatagggcttaccggcgtgtaagctctatgccttttcttggtctaaagactggaagtgccgagcaggagctgtgtccactctttggaagaaaggatgctcccggggcgaaatacgcctgcaaacgggggcattggcgggataataaatacccggcaacgcgggggagcgtaacccaccagaattacacttcaacataatttggattttacgatgtccacagcaaaaacacaacaaagaattagcttttcgacagtcaagaaccgggtgccttatcccgatctgctggaggtacagcttaaatcattccgggactttttccagatggacaccacggccgaaaatcgtaaaaacgaggggctgtataaggtgtttcaggagaatttccccattacggatacccggaacaatttcgttctggagttcatcgactactatatcgacccgccgcgctactcgatcgaggagtgtctggagcgcgggctgacgtacagcgttcccctgaaagccaaactcaagctttactgcacggacgacgagcacgaagatttcggtgtcgtcgttcaggatgtgtacttcggtacgattccctatatgaccgaacgcggtacgttcgtcatcaacggtgcggagcgtgtcatcgtatcccagctgcaccgttcgccgggcgtgttcttcggacagagcatgcacaccaacggcacgaagctctattcggcgcgtatcattcctttcaagggttcgtggatcgaatttgcaacggacatcaacaacgtgatgtatgcctacatcgaccgtaagaagaagcttcccgtcaccacgctgctgcgcgccatcggctacgaggcggaccagcagattctcgaaatcttcgatctggcggacgaagtgaaggtcacgaaggccaacctcaagaaggccgtgggccgcaagctcgccgcacgtgtgctttcgacgtgggtcgaggacttcgtggacgaagatacgggcgaggtggtttccatcgagcgcaacaacgttatcgtggaccgcgagacggtcctcgaagaggaacatgtggaccagattctcgaaagcggcgccaagacgatcctcctgcataaggagagcctgtcgggcatcgatttctcgatcatatacaataccctgcagaaagacccctgcaactccgagaaggaggctgtcgtttacatctaccggcagctgcgcgcttcggagccgcccgatgaggcgacggcgcgcgatgtcatcgagaagctgttcttctcggacaagcgctacgacttgggcgacgtgggccgctaccgcatcaacaagaagctggatctggataccgatccggccattcgcacgttgacgcgcgaggacatcatcgccattatcaaatacctgatccagctgatcaactccaaggccgacgtggacgatatcgaccacctgtcgaaccgccgcgtgcgcaccgtgggcgaacagctgtcgaatcagttctcggtaggtttcgtgcgcatggcgcgtacgatccgcgagcgtatgaacgtgcgtgacaacgaggtgtttacgccggtggatctgatcaacgccaagacgttgtcttcggtgatcaactcgttcttcggcacttcgcagctctcgcagttcatggaccagatcaacccgctggccgaaattacgcacaagcgccgtctgtcggccctcggccccggcggtctgtcgcgtgaccgcgccggtttcgaggtgcgagacgtacactacacgcattacggccgtctctgcccgatcgagtcgccggaaggcccgaacatcggtctgatttcgtcgctctgcgtttatgcgaagatttcgccgatgggattcatcgagactccctaccggaaggtcgagaacggacagatcgacatgaacaacgacgacatccgctactactcggccgaagaggaggagggcaagatcgtcgcgcaggcgaacatgccgatcgacgacgaaggccacttcctgcagcccgaccgtatcaaggcgcgcgaaggcgccgacttcccggtggttaccgccgaggaggtgaatctgatggacgtggctccgaaccagatcgcttcgatcgccgcgagccttatcccgttcctcgaacacgatgacgccaaccgcgccctgatgggttcgaacatgatgcgtcaggccgtgcctctggtgactacggacgctcctatcgtcggcacgggcatcgagaaggacatgatctctgacagccgcatccagattgtggccgaaggcgacggcgaagtgactttcgccgacgcgacgaagatacagatcaggtacgagcgtacggaagacgagattctggcgtcgttcgagccggaagtgaccacatacgagcttccgcgctaccgccgtaccaaccagaatacttccatcaccctgaagcccatcgtactgacgggcgacaaggtcgtgaagggacagatccttaccgaaggctattcgacgcagcacggtgagctggctctgggccgcaacctgaaggtggcgttcatgccttggaagggttacaacttcgaggacgccatcgtgatttcggagcgtatccagcgtgaggacatcttcacgtcggtgcacgttgacgagtacatcatggaggtgcgcgacaccaagcgcggtgtcgaggagctgacttcggacattccgaacgtgagcgaggacgctaccaaggacctcgacgcgaacggtatcatccgtatcggcgccaacgtgcatccgggcgacatcctgatcggcaagatcaccccgaagggcgaaagcgatccttcgcctgaggagaagctgctccgcgccatcttcggcgacaaggccggcgacgtgaaggacgcctcgctcaaggcgcagccttcgctgcacggcgtggtgatcgacacgaagctctacagccgcgccaacaaggagggcaagaagggcaagagcgccgagaaggtgcagatcgagaaactcgacgagaagttcgcagccgagattgcggagctgaccaaacggctggtggccaagttgtggaccctgcttcagggcaagaccacgaccggcgtcaccgactacttcggcgtggaactctatcccgcaggcacgaaattctcgcagaagatgctggaggagatcgcccgcaagaccacggacgagaagaccggcgtggtgatgggttatctgaatctcggcacctgcaagtggacgggtgacgcccacaccgacgcgctgatcgaagctaccattaacaattataccatcgaatggaagaaggccgacgccgccatcaagcgtgagaagtacaacatcaccaacggcgacgagcttccgcagacgggcgtcattcagatggccaaggtctacatcgccaagaagcgcaagctcaaggtgggcgacaagatggcaggacgccacggcaacaagggtatcgtagcccgtatcgtgcgcgacgaggacatgccgttcctcgaagacggtacgatcgtcgatatctgtctgaacccgctgggcgtgccttcgcgaatgaacctcggacagatttacgagaccgtgctcggatgggcgggccgtgaactgggcctgaagttcgcaacgccgatcttcgacggtgcgtcgctcgaccagatcaacgagtacacggccaaggcgggtattccgcacagcggccgtacgtacctctacgacggcggcacgggcgaaatgttcgaccagccggcgacggtgggcgtgatctacatgctcaagctcggccacatgatcgatgacaagatgcacgcccgttcgatcggtccctactcgctcatcacgcagcagccgctcggcggtaaggcccagttcggcggccagcgtttcggtgagatggaggtttgggcgctcgaaggcttcggcgccgccaacatcctgcaggagatcctgaccatcaagtccgacgacgtgatgggccgcgccaaggcttacgaggcgatcgtcaagggcgagaacctgcccaaaccgggtattccggaggctatgaacgtgctgctgcacgagcttcgcggtctggccctgtcggtcaaactcgaataaggtataatttgaggataagaaaaacgaagaacaaatatgtcaatttccaaagacaataagacgaacaatggttacagccgcatttcgattggcttggcctcccctgaggagattctggcccagtcgagcggcgaggtgctcaagcccgaaaccattaactatcgtacctacaagcctgagcgcgacggtctgttctgcgaacgcattttcggtcccgtcaaggactacgaatgccattgcggcaagtacaagcgtatccgctacaagggtatcgtctgcgaccgctgcggtgtggaggtgaccgagaagaaggtgcgccgcgagcgtatgggccacatttcgctggtcgtgcccgtggttcacatctggtacttccgttcgctgccctcgaagatcggttacctgctgggtattccgtcgaagaagctggaggcgatcatctattacgagcgttatgtcgtgatcaacgccggcgccgccgccgagcagggcatcgagcgtctggccacgctttcggagaaggagtatctcgacgtgctggccgcgctgccgaagggcaatcaggcgctggatgacagcgatcccaacaagtttgtcgcgcagatgggcgccgaggcgatctacacgcttctgaagaccgtggacctcgattcgatgtcctacgcgctgcgtcacaaggcttcgaccgagacttcgcagcagcgtaagagcgaagccctcaagtgcctgaacgtcatcgagtcgttccgcgcgtcggagggtaagaacaagcccgaatggatggtgctgaacgtcatcccggtcattccgcccgaactgcgtccgctggtgccgctggacggcggccgtttcgccacgtcggacctgaacgacctttaccgtcgtgtcatcatccgcaacaaccgtctgaagcggctcatcgagatcaaggctccggaggtgattctgcgcaacgagaagcgcatgctgcaggaggctgtcgattcgctgttcgacaactcgcgcaagagcaacgccgtgaagaacgagtcgaaccgtccgctcaagtcgctgtcggattcgctcaagggcaagcagggacgtttccgtcagaacctgctgggtaagcgtgtcgattattcggcccgttcggtcatcgtcgtcggccctgagctgaagatgcacgagatgggtattccgaaggacatggcggccgagctttacaagccgttcgtgatccgcaagctcatcgagcgcggcatcgtgaagacggtgaaatccgcgaagaagatcatcgaccggaaagaccccgtgatctggggtattctggagaatgtcataaagggacaccccgtgctgatgaaccgcgccccgaccctgcaccgtctgggtattcaggcgttccagcccaagctgatcgagggcaaggcaatgcagctccacccgctggcatgtacggcgttcaacgccgacttcgacggcgaccagatggccgtgcacctgccgctgggaaatgccgccattctggaggcccagctgctgatgctcggttcgcacaacgtccttaaccccgccaacggcgcgcctatcaccgtgccgtcgcaggacatggtcctcggtctgtactacatcaccaaaccccgcaagggcgtgaagggcgaaggccgcgtattttacggtcctgaggaggctattatcgcctacaacgagcgtcaggcggacctgcacgccatcgtgaagtgtctggtggacgacatcgacgagaacggcaatccgattaccgaattgaaggagacgaccatcggccgcatcctcttcaatcaggtggtgcccaaggaggtcggttatatcaacgaaatcctcacgaagcgttcgctgcgcgacatcatcgccgtggtgatgaagaaggccggtgccgacaaggtggccgctttcctcgacgatatcaagcacatgggttaccagatggccttccgcggcggtctgtcgttcaacctcgacgccgtgattatccccgaagagaaggagaaactcgtgcaggagggttacgagcgttcggactccatcatggaggactacaacatgggtctgattaccaacaacgaacgttacaaccagatcatcgacgtctggacgaacatcaataccaaactcacgaaggtcgtgatcgacacgctgatcaaggacgacgacggtttcaacccggtatacatgatgctcgactccggcgcccgcggttcgaaggagcagattcgtcagctgagcggtatgcgcggtcttatggccaagccgcagaagtcgggcgtcgagggcggtcagcaggtcatcgagaacccgatcctctcgaacttcaaggagggactttcggtgctggagtacttcatttcgacgcacggtgcccgtaagggtcttgccgataccgcgcttaagaccgccgacgcaggttatctgacccgtcgtctggtggacgttgcgcaggacgtgattatcaacgaagaggactgcggtacgctccgcggcttgacggctacggccatcaagcgcaacgacgacgttgtgcagacactctacgaccgtattctcggccgtacggcactgaacgacgtgatccatccgcttacgggcgaagtgatctgcaaggccggcgaggagattaccgagtcgatcgccgaagcgatcgagaagtcgccgctggagtcggtcgagatccgctcggtgctgacctgcgaggcgcgccgcggcgtatgcgccaaatgctacggccgcaaccttgccactgcccgcatggtgcagaagggcgaagtggtcggcgtgatcgccgcccagtcgatcggcgagccgggtacgcagcttacgctccgtacgttccacgtcggcggtgtggccggcggtacggccgtcgagaccaatgtcgtttcgaaatacgaaggccgtctggaaatcgacgagctgcgcaccgtcaagggcaagaacgccatgggcgaggcgatcgacatcgtcatttcgcgtcagtcggagttccgcatcgtcgatcccaagaccgaaatcgttctctatacgcacaacctgccttacggcgcgacgctcttcatggcggacggcgccgaagtcaagaagggcgacatgatctgcgagtgggacccctacaacgccgttattatttcggagtacgagggccgcgccgtttacgaaaacatcatcgagggcgttacctaccgcgatgagcgcgacgagcagaccggactttcggagaaggtggtcaccgagtcgaaagacaagaccaagaaccccgtcatcaagatcgtcaacaaggagggcgaggaggttaagcagtacaacctgcccgtttcggcccacgtcgtggtgaaggacaacgccaagatcaaggccggcgatatcctcatcaagattccgcgtgccgtcggcaagtcgggcggtgacatcaccggcggtctgccgcgtgttaccgagctgttcgaagcccgcaacccgtcgaaccccgccatcgtttcggaaatcgacggcgaggtgtcgttcggcaagatcaagcgcggtaaccgtgagatcatcatcacctcgaaacagggcgatatgaagcgttacctcgtgcccctgtcgcgtcagatcattgtgcaggagaacgactacgtgaaggccggaagcccgctgtcggacggtgccatcactccgagcgacatcctcaatatcctcggcccgacgaaggtgcaggagtacatcgtcaacgaggtgcaggaggtgtaccgcatgcagggtgtgaagatcaacgacaaacacttcgaggtcatcgtccgccagatgatgaacaaggtgcggatcgaagatccgggagacacccgtttcttcgaggaccagaccgtcgacaagtgggagttcatggacgtcaacgacgaactttacgacaaggtggtcgttaccgacgccggcgattcgacgtcgctgcagcccggacagatcgtttcgctgcgcaagctccgcgacgagaattcgagcctcaagcgccgcgacatgaagcccgtgcaggtgcgcgatattattcccgcaacctcgacgcaggtgctgcagggtattacccgcgccgcgctgcagacttcgagcttcatctcggccgcatcgttccaagagaccaccaaggtgctcaacgaagctgccatccaagcgaaggtcgatccgctggagaacctcaaggagaacgttatctgcggtcatctgatccccggcggtacgggtctgcgcgagtacgacaacctcgtggtcggttcgaaagccgagctggaatcgcttcagcaggcgcagtaaacctacgttatatatacgattcgaaagaagccgttccagaaggaacggcttcttttttaccttgtccggattatttcattgtctttatcacgtcattgtcccgataattatgcgtaaatcgaaatggttcataatcccggcggcttggctggctgttttcttatcggtcggatgcgttggctgccccaaaccgggtgtttcggcgcaagcggagatgaccgctgacggagttgctgcggatagctgaaaaccctgtacgctgcagcgaagcgtgcttggcgctgttcgaacttacgggaccggcgaaaacctgccaagcagagagctggcagaccggaactgccgaaaaagagtgcgaggagtggagaggatgcgcaggccgggatgtcggcgttgctgccctgtgatgccgcaggccggatcgttgcgcagaggctcgaatacggggacgatgcggtgggggacggcgagcggcctgccgaattttcatacgatgacgccgggcggctgacgcggacccatgcgaatcccggcccgcaaaaactgcgggttcctgccggggagagcctgtccgggttattttttgtcgttgtaacgcttggcgagacctccggtcgatgtttcgcggtagagactcggcaggttgtggccggtttcgttcatcacctccacgaccttgtcgaaactgaccatatgcgaaccgtcggagagcgtggcgtaggcgttggcgtcgaaggctctggccgcggcgatcgcgttgcgttcgatgcaggggacctgcacaagtccgcagacggggtcgcaggtcaatcccagatggtgttcgagtcccatctccgcggcgtattcgatctgcgcaggcgtgccgccgaacaactggcaggccgcggcggcagccatggcgcaggccacgccgacctcgccctgacagccgacttcggcgcccgaaatcgaagcgttggtcttggcgacgttgccgaagagtcccgccgtggccagcgcccgcaggatgcggatgcgcaggaagttgcgcgaattggccagatggtagagcaccgccgggacgacgccgcacgagccgcacgtcggggccgttacgacggtgccgccggaagcgttctcctccgaagtcgccagcgcataggcgtaaatctgggcgcgggatttcagcgagtcggtgtagctcttcgatttgacccagtaggtgctggctttgcgggcgactttaagccctccgggcagtacgccgtcgttgttcaggccgcgctggatcgtctcgcacatcacggtccatatctcgtcgaggtaatcccagattccgggaccttcgcagtcggttacgtattcccagtaagtcttgccttcgtggctgcaccacgctttgatctcgctgacggtagtcagcggatagatgctgtgcggcgtttcgagacgcgacgtctcgtttgccagcgcacctccgccgatgctgtagatggtccagctgtccgtgacattgcctgccttcagcccttcgaacagcatgccgttggggtggaagggcagcacgacctccggtttccagacgatttcggttggagcgagaggttccagcaccgagaggatcgcggtgtcggtaaggtggcctttgccggtggcagccaacgacccgtacagcgtcacgcggtaggcgtccgcatcgtgacagcgttcggcgaaacgttcggcggctttcttgggccccatcgtgtggctgctcgacgggccgttgcctattttgtacaactccttgagtgattccatcgtatcgttgttttcggggcaaagacagtgcaggccgggggcagagacgaatttattcgaaccgtgccgggacgccgcctgtctgagcggaggtttatccgccgcaaagataatgtaaatgtcggaattttctcttcccgaaagagatttgaagagatcggaggcctgcccggcgggtttataaaacaggagagaagcctcggtttctctccttgtagtctcaccgcgactcgaacgcgaatctagggtttaggaaaccctcgttctatcccttgaactatgagaccctgaaaaaagcggtgcacctccgacgaagcgcaccgcaaagataataatttttcccgtttttagaaactgaaacctacgccgatcgagaacgtgtgggcgcgggcggtgtaattacccgaaaaatcggcgatcgggctggtgagctggctttcgggaacgcctgccgccgtcagtttttcgttcacgatgcccagcaccgaattggtgtagggataggaacccgtgcgctccggatcggccgaattgacatagccgtaggcgatgtcgatgttcatccatttgatcgggcggaaggtgacgccggccgtataggcgagcttggtcatcgacggggtttcgggattgaggtagtcgctgcgcacggggctttcgtccacgtacatacccatgcgggccgtcagccagtcgagagcgtggtactggccgccgaaacggaacgccagcgtattggagtatttcttgtcgctgaccggaatgttcagcacgggcgtattgctgtcggggtcgagaatccggacgtcgagctggtcgtaggcgctccagagcacatattgcagatcgacggcgaattcccacttcggaacggggcggaagctgacgccccacgtcagcgacgccggcaggggcagttcggtcttcacgacggccgacgtgagtttggcggggtcgagacccagctggggcaggagctggccgattgcctgagcgatctgggcgttgtcgatcatacgcaggtcgatcgaacccgaatccaccttcattttgagtttcgaacggtaggtgaagcccagcgaccactgttcgttgatgtcccacatcatgccgaggttgacgccgacggccatcttggctttgccttcgaggcccagcgacatcagatttttgtccccggccatttcgaagaggttgggcatttgctgcggattgagcatttgcaatgcgcccatgagcgccttgttctgtgcgttgtccggaccgataggcagcagcgaacgcgaaaggtcgaatttaccccacgtcatcatcagaccgccgccgacggagaggtgctcgcagagtttgaacgagacggtcggctggacgttgtatgccttgagattgatcgactgcacgagctgtgctcccggccagttgttgccccagtccatcgaggagccgaacggcgtgtttaaggccagaccgaccgacatccagtcgaggggtttgtagttgaagtaggcgtaaagcggagtggctatgctgttgtccgaggtgtagtgctgcggtttggtcttgcccgtatagtcggggagcgacgtataggtagccttcgaagcgatacccgtgatgccgaccgaaatgtcgaactcggagtcctgaaacgaagcggcggcggggttgaaccagatcgattcggagttgagtttcatggctgtacccacatggcccataccgttctgcttcgaggagaggttgttcacctgatatccttcggcgtatgctccggaggcggcggcagcggcggccagaagtaggaagatttttttcataacgtattggtttggtttatactgtccgcactgcggagtgcgaaaaatcgagggcaaaagtataaaaactattcccgccgcccaaactttttggcctaaatttcctgaaaattgacctgaatggtataggattggccgaaaggacgggtggggcgggggatgcgctgccgcatgaaaaaagtgcggcatgtttcatgccgcacctgagtcttcgttccatgccggattatttccggttgttgtacgcttcgagcgccttgcccagaatgagcagcgagcgttcgaggtcctctttcttgaggacataggcgatgcggacctcgttgcggccgcgggtcgggtcggagtagaagcccgaagccggggcgagcatgacggtctctccctcgtattcgaaatccgaaagacaccatgcgcagaagtcgtcgctgtcttcgaccgggagccgcgccacggtgtagaaggcgcccatcggaatcggcgaataaacgcccggaatgcggttgagaccgtcgatcaggcatttgcggcgttcgatatactcttcgtagacttcggtgctgtaggagcgcggagcgtcgatcgaagcttcggcgacgatctggccgatcagcggcggcgagagccgcgcctgacagaatttcatcaccgcgtcgcgcagttttttgttcttggtgatgagcgcgccgatgcggatgccgcattcggagtagcgtttcgacaccgagtcgatcagcacgacgttctgttcgacgccttcgaggtggcaggccgaaatatagggcgaaccggtatagatgaactcgcggtaaacctcgtcggagaagaggaaaagatcgtatttcttcaccagatcgcggatgcgctccatctccttgcgggtgtagaggtagcccgtggggttgttggggttgcagatcaggatgccgcgcgtgcgctcgttgatcagtttttcgaactccgcgacgtcgggcagcgcaaaaccctgttcgatcgacgagacgaccggacggatcacggcgcccgccgagatggcgaaagccatatagttggcgtaggccggttcgggcacgatgatttcgtcgccggggttcaggcacgacatgaaggcgaacaacaccgcttcggaacctcccgtggtgacgatgatctcttcgggcgaaagtttgatctggtattgttggtagtagcccgccagcttttcgcggagcgaccggtaaccgtcgctggggctgtattcgagtacgttgcggtcgatcttcttcaacgctgcgagtcccgtctggggcgacggcagatcgggctggccgatgttgaggtggtagattctgattccccgcgaccgggcggcttccgccagcggaacgagtttgcgtatcggagatgccggcatcagctcggcgcgttgtgagatttcgggcatgcgtaaaaaggttttgaatggcgcagcagactattcaagctcgatcgtcggacggaatttgacggccttgcggggcgggatcttcacggccgcacccgtgcggggattgcggcctacgcgcgcggctttctgctgcacgctgaacgttccgagacccgtgagggtaagacgctccccttcgcggagcgactgtacggtcacccggataatggcatcgacggctttgcgcgcgtcgattttcgaaatgttcgcatcgagagcgatagcctcgaccaactgcgctttgttcatattatttgcgtgtgaaaagttgcgtctcttcctaacctattggcaaagatatgcaattttcctaaaagtcaaaaattatagtgcggaattggaactttgccgccctccgtcgggaataaacgggataaagatttggcagaatggaaaatccgtgctacttttgtctccggaaagatggcagagtggtcgattgcggcggtcttgaaaaccgttgagctgcgaggctccgggggttcgaatccctctctttccgccaaggaagagtgcaacatttaggttgcactcttttttatatgtttcaattcggaagggaggggatgaacaagccccggattccggggcttgttctattgcgcttatttgcgtttcttgcctttggcggcgattcgctgggctgccgtgacggtccgtttgggtgtcttgcggacgcttttggtgcccttgcctttgccgttctcgtcgcggccccatgccgtgccgtcgtcgaatttcatgaaggccgaccagtcgaagccttcgttcgacattttgctgaaatcggggatttccggacggggttcggtttggatcttggttttgagcttgcggcgcggcgcggcggattcgtcgccggcggccggggcggtttgtgccggggcggccggtttctccctgcggacggattttttcggggccggggcgtattcctctccgccggcgtcggccgttttcgcgcgccggggtttgcgggctgcggcttcctcgccgtcgcgggcgatttcggctatcggccggcggccccggttcaggcggttgagcttgcggacgatctcttcggcatcgtggaacggcacgctcacgaacgagaagttgtccgagatctggacgtcgttgatgtatttgtcgcgcaggccgcacttgaacttgagcatatcgaccagcttgcgcgccgtgtagccgtcgcgtctgcccacggcgaggaacagccgcgccgtgcctttgcggtccaccgagaacgaacggatttcggggtagttgctctggtcgagttcgctgcggaacgccagacgcaatagggcgcccagcgccacgtcgggcgtgtattcggccagcagttcttcggcgaactcccggtatccgtcgtaactttcgttttcgacgatctcctgcatctcatccttgatcttcagccgtttcatctcgacgatgtcctgcggcgaggggagggtttcgcgcttgatctcgaccttgatgtcgcgcatcaggttgttcagtccccggaattcggagggcgagacgaaggtgatggctgtgccctgcttgccggcgcggcccgtgcggccgatgcggtgcacgtagctctcggagtcctgcggcagcgagtagttgatgacgtgggtcagattgcccacgtcgatgccgcgcgccgccacgtcggtggcgacgaggatattgaccgagcggtcgcggaacttgcggagtatcttttcgcgctgggcctgcgagacgtcgccgtgcagcacctcggcggcatagccgcgggcggcgagccgcgatgcggtttcgtcggccccgatcttggtgcgggcgaagatgatgccgtagaattcgggctcgacgtcgatgatgcgggtcagggcgtcgaacttgtcggcttctcgcacctcgaagtagatctgctcggtgaggtcggtcgtgagctgcttgttctcgacgcgcacgatctccgtgtcgcgcatgtaggttttcgagagccggatgatgcgttcgggcatcgtcgccgagaagagcagcacgcgccgctcctcgctggtgtggctcatgatctcctcgacgtcctccacgaagcccatgttgagcatttcgtcggcttcgtccaatacgaggtaacggacgttttcgagtttcagcgtgccgcggcggatgtggtccagcacgcggcccggcgtgccgacgacgatatcgacgcctttggcgagccggcgcagctgttcgctcatcgcggcgccgccgtagatggcggtgatcgagagccgtttttcgcggttgtaggagagcagctcctcggcggcctgcagcgccagttcgcgcgtcggcacgaggataatggcctgaaccggtccgcgggcgggttcgagcgactggagtatcggcaggccgtaggccgcggttttacccgtaccggtctgcgactgggctatgatgtcgttggttttggtaagcaggtgggggattgtgagcttctggattgcggtgggcgtctcgaatcccttggcgcggactgcggtgagcatctgctcggaaagccccagtgcgctgaaatcgtctgtaatggtcatgtgcatattttaatcgggggcaaaggtacgataaataaagcagatagatactgcggcgcgcgaaaaaagatgaaagtccggcggcgggcgtttgccgggatgcagccgatttatacccgatccgggcggtcggcgcggtcgattgaaatatttttgttatatttgcccgaatttttaatctaaataggatggcatacaatttattgaaaggcaagaagggccttattttcggagcactcaacgagcagtcgatcgcatggaaagtggcggaacgcgccgttgaagagggtgccgaaatcgtcctcacgaatactgccgtatctattcgcatgggtacaatcggccggctggctgaaaaatgcaatacgatcgtcgttccggccgacgccacgagcgtcgaggatctggagaatctgatcgacaagacgatggaacatttcgggggcaagttcgacttcatgctccactcgatcggcatgtcgcccaacgtccgcaagggccgcacgtacgacgatctggattacgattatctctcgaagacgctcgatatttcggccatttcgttccacaaggcgattcaggtggcacgccgcaaggacgccatcaacgactggggttcgatcgtggcgctgagctatatcgccgcgcagcgtacgctttacggctacaacgacatggcggacgccaaggcgctgctggagtcgatcgcacgcagtttcggctatatctacggtcgtgagaagcacgtgcgcatcaacaccgtatcgcagtcgccgaccccgacgaccgccggaagcggcgtgctgggactgggcgacctgatggagttcgccgagaacatgtcgccgctgggcaacgcttcggcggaggactgcgccgactatgtgctgacgctcttctcggaccttacgcgcaaggtgacgatgcagaacctctaccacgacggcggtttctcgtcgatgggtatgagccgccgcgccatgaagacctacgagaagggacttcgtttcgacgacgtgcaccagaatcagtatccgttcggcgatggcgaaaaatagccggcggaaaaggtcggaataaaaaaagggggaaagtctcagactttccccctctttcgtgtcaatacatatggtcgttcccgcgtatctcttcgcgggtgatcggcttgcggttcatggcccgccatgcgtaccagatataggctgcgacgaacgggatcatcagcgagacgacgctcatcactttgagcgtgaattcgctcgacgacgagttgtaaatcgtcagcgacgactgcatctccgccagcgacgggtagtaggccgtgttgttccatccggcgcacagcagcagggccagtaccgtcagcacggtgcccgcgccgccgaaccagacggcattgcgttttccgcgccagcccgaatagatgctccacagcaccgataccacgccgatcagcagcgctgcggccacatagggcatttcgagcatgttgtgcaggtatttgtaaggctcggccgaaatgcggcctgcggcatcgaccgccaaaccgtcggaaaagagcagccagacgaagaatgtcaggaagaagacgaggaacggggcggcgagggtcagcatgcgcctgcgggcgcgggcgaagagcgtctcgtcggcgatgttgttcatgaagtactggcaggccagcatcccggcgaggaacatcacggccagccccagcgccacgttgcgcatgtctccgagcgcttcgagaccgtgccacggcgtggtccactgcgagatgaccgttgcgctgccgctgcctgcgccgttggccaagttgaggcggtccaccgtgaagtttgcacccgtgaagagcgtcccgacggctgtgcccagcagcaggggacctgcgatgccgttgatcgtcaggaagacatcgaacgtcttttcgccgaaaacgttgcctgccttgcggcggaactggtaggcgacgggctgtatgacgaaactcagcagaatggtcatccacacatagtaggcgccgccgaacgaggtggagtagaagagcgggaacgaggcgaagaacgcgccgccgaacgtcacgagcgtcgtgaaggtgaactcccatttgcggcccagcgaattgaccagcatgttgcgttcctcctcggtcctgccgaggcagtaaagcagtccctgtccgccctgcacgaagagcaggaagaccagcagcgctcccagcagggagatgatcagccaccaataatgttgcaagagtgttatagtttccatagtagtttattctttttcttgttcgggaccgattttaatctgacggaacagaatgctcagttcggcgatcagcagcgccgtgaagagcgcgaggaagatgaagaaggtcgccgtgaccgacgtgctgccgatcttcgacgcggcgatgcccacgggcatcaggtcctgaatggcccacggctgccggccgacttcggccagcacccagcccgcctgcgacgcgaggtaggccagcggtacggaccatacggcgatccatagcagccagcgtttgtccgccagccggtccttgcggtttaaccaccagacgagtcccagcagcaggatgaagaagcatccggcgcccaccatcacgcggaacgagtagaacagcagcggcacgtcgggaacgatgtcctgcggtgcgtcgaggtagccgtaaccgaagtaggcgaagtattcgcgcaggaactcctcgccttggggcgttgcgggatcgaatttggcggtgacttcgtcgatcgtggcttggtcgccctcgtcgagcgccttgcggtagcgggccagctcgccgacggccacgcggccgcgttcgattttctcgcccgccgacatgacgccgtaccgctcgttgccgttcaccagatcgttgatgcccgccacataggcgtccgcatcgcggaaactcatgatggagagcagtttcggaatgtcgattttgaagtagaacgcgtcttcgttcgacgtgcgctcggcttcgggcttgacgatgccgatcgctgtcaggggggcgccttgcgaaccgtcgtagagggcctccatggccgcgagtttcatcggctgcacgcgggcgatgactgcgccggaccggtcgccggtcgtggccgtgaccagcgcgaagatgaagccgaaggccgaagcgatggcgatgctcttgcgggccatcttctgctcgcgccgcctgagcaggtaccatgcgctgacgcccacgacgaacagcgacgccagcacgaacgacgaggtgacggtgtggaagaacttgttcatcgccacgggcgaaaagagcacgtcccagaacgaggtcatctcgttgcgcaccgtttcgaggttgaacgtacagcctacgggatactgcatccatgcgttggcgaccagaatccacagggccgagaggttggccccgatggccgtgagccatgtcgccgtgaggtggaagcccttcgagaccttgttccatccgaagaatatgatggcgatgaaggtgctctccatgaagaaggccatgatgccctcgacagccagcggggcgccgaagatgtcgcccacgaaatgcgagtagttggaccagttggtgccgaattcgaattcgaggatgatgcccgtcgccacgccgatggcgaagttgatgccgaacaggcgcatccagaatttggtggtccgtttccagaattcgtcgcccgtgcggacgtagagggtctccatgatggcgaggatgaagcccagtcccagcgtgagcggcacgaaaagccagtggtagatggccgtcatggcgaactgcgcacgcgaccaatcgactgtttgcaagtaatcggatagcatagatacggagttatttttcgggggttagttccttcatcaccgagcggctgcgctcttcggggctttggccggccagaaaatcgggaaagaaaaagagtttgagaatggcgaacatgatgaacagcttgaccagaatgatggcccagagcgtcttgcctacagtcatgctgcggaagccgtccacatagaaccggaacacttttttgagagtctgaactgccattgtgtctgcatatttaatcaaaaatagataaaaaatcggaaataaaaaagaatgccgctccgaaaagccgcacccgtatattatccggccggaaatgcttatcgccggtcatgccgcaggcgctctttcgcccgtctgcggggagtgtcgtatttgctgggcgcccgaattgattctggaaaacgataaatattttctatatcttcggttgaaagaaaatttatttactaagcattttggggtgatgttttgggttaattgtcagatatttaatatgtttgtgtgattgtgttctataaaaatattttatttatgtttattttaaagtaaaaaatattattataaaagttttgtgtaataattttaattattacatttgttggcgaacatacaataaatctgttcagaatatatataaggtatccgaaccgaaccaaaacccaatgctgactgaaatatgaaactaaaatttcttggcttcgccctgcttgctgtctgtgtctgcgccgtgtgctgtatgtgcggcagcgattcgaaaacgcccgactatgaatttcccgacggacccgatcccgacccgcagccgggcgattatcctgccggcctgaccgtaaccgagtttacggacgatctgggcggaggaaaacaatgtctcggattcgtggccgtggccgacctgaaagccaatcccaaactgcgcttcaacgccgtgcatctgccgcagcagaaaactccgtcgcgcattcatgccgaattcgcttcggccaaccggggaacggcttgtgtgacgatcaatgccgggtattggtgggccgggaactcgctgagcctgcttgttaccggcggtaccgtcaagtcgatcgagaatcagacggtgacacgtaacaatcagacggtttatcccgtgcgttcttcgttcgggcagatggcgtccggagggttcgagacgcactggatttactgcgttctcgacgacggcaacaagccttatgcctttccgtccgcactcgacaacgacgaacgtacgaatacgtatatgtccgcgccgccgacttcgaagacgcccggcgccgtgctctggacgccgcaggaagccgtcggaggcggtccgatgctggtcaaggaggggaagaacgtcgccgtggagaattattggaaagaggtgttcgacggcggcggcatcgccgggacttcgcgtcagccgcgtacggcggtcggcgccacggccgacggaaaactgatcctgctggtgtgcgacggacgcaatatgcggggcagcgccgggtttacgctggccgaactggccgacaaactgatcgagctgggtgccgtcgatgcggtcaatctcgacggcggcggatcttcgaccatggtcggcagcgacggcaaggtgctcaaccgtcccagcgacacgggcagcgccgaggtgatcgtcgagcgcaagatttcgacggcggtcgtcatctccgaagtgaactaatccataaagaatcatatgaagaaacttctccttatctgtctcgcggcctttgcagccgcctcctgcacgcaggaaaaacagcagtcgaaaccgctttacatgtggttcgactgcgaaggcaattacgctacgctgagtcatcccgattcgatccgttattacgtgtccaaaatccacgacatgggctttaccgatgtggtggtagacgtgaagtcgatcatgggcgaaacgctctacaagagcgatattgcgccttacatgggcgaatgggacggcgtgacccgtcctgagaactacgatctgctgggctatttcatcgaggagggacacaagctgggcatgcgcgtgcacggttcgctcaacgtgttcgccggcggtcacaacttcttcgaccggggaatcatctacggcgatcatgccgactggcagtcgcaggtctacaccgaagggaagatcgtgccgatcagcgaaataaagagcaactacaacggcatgctcaacccggctaatcccgaagtgcaggagtacgagctggcgattctgagggagttcgccgagaagtatcccgatgtggacggcatcgtcttcgaccgggtgcgtttcgacaatatcacctccgatttcagtccgctgtcgaaggagcttttcgaagcctatgccggaacgaaagtcgccgattatcccgatgacattctccgctggacgcaggatgccgacggcaagtgggactggtcgcagggcccgctgttccgcaagtggatcgaatggcgcgcatcggttatcaaggacttcgtgaccgaagcccacaggcagctcaaggagatcaatccccggctgctgatcggggactatacgggcgcatggtacccgacctattattacgtgggcgtcaactgggccagcgaacagttcgatcccgcccgctatttcgattgggcgacgcccgaatacaggaatacgggttatgccgacctgctcgacatctatatgaccgggctttactatacgctggttaccaaagccgaagtcgacaaggcaaacggagtcgtcgggcagcgtaccgaagcgggaatgtccgacgagcagaattactggtactgcatcgagggcggcgccgaatgggcgaagaaaatcacctgcggcgtggttcccgtgacgggttcgatctatgtcgagcagtacgagggcgatgccgcgcaattcacccgcgccgtggcgcaggcgctccgcgacaccgacggactgatgatcttcgatatcgtccatatcatcaaccgcggctggtggtcggagctggcggccggaatcgccgaagggagcaactgatctgcaaccaatataaaacactaaaaacttaaccttaaatgtaattctatgaaagagttcttctctagattcagagattctctggcggcgaggacgtgtctgtggacattgttcctgctgttggcgggggccgggacggcctttgcgcagcctaccgtcgggggtacggttaccgatgaacagggcaatccgctcgtcggtgtgaccgtggtggtcgtggactcgaacaagggtacgacgaccgacataaacggacagtattccattgcggttcccaaaggcggtatactggaatttacgtatatcggaatgttctcacagagaataacttgtggggggggggatttccaaccttgacgttacgatgaaagaggatgccgcccgtttggacgaggtcgtcatcctcggttacggctcgcagcgccgcgccgacgtgacggcggccgtgtcgcagatcgacggcaaggagcttcagaagatgccgatgtccaatatctcgcagggactggccggccgtctgccggggcttatctccgtgcagaattccggacagcccggtcaggaccaagccagcatgaccattcgcggcgcgaagtcgggtattctctatatcgtcgacggcgtgcagcgttcgatcaatgacatcgaccccaacgatgtggagtcggtatcgctgctgaaggacggcgccgccgtagcggtttacggtctcgaagcagccggcggtgtgatgatcgtaacgaccaagaagggcagacagggtgcgatgaatctgacttacaaggggtcctacggtgcgtcgttcaatacctcgtatcccgaattcctcgacggtccgggttatgcttactggtacaacaaggcgctcgaactcgacggtcaggagccgatcttcacggccaagcatgtacagatgatgcgcgaaggcacgaacggctggggcaacaccaactggatcgacgaaattttcggaaccggtacgattcagcagcacagcgtcacttcgacgggcggcagcgaccggatcagttatttcgcttcgctgggctatatgaatcagaccggtaatgtcaagaatttcgattacgaccgctacaacctgcgtacgaatatcgaagccaagattgccaagagtctgacctttacgtttggagtggcaggtcagataggagatcggaaggaacccggattccctgccggaggaacttccggcaccagcgtttcgacggccccgtggctctcgattgccgagcaggccgcctatgcgcatccttatctgccgaagacctatgacggacttccgaccgcgagccagaataattacgggaatacgatcaatccgattgccgctaccgaactgtcgggctattcgaaatcacagaccgtagccgtacagaccaacgctgccctgcaatgggatcttccgtgggtaaagggtctcagcctgaaggttatgggtgcgtacgaccgcagctctacgacatccaaaatcctgagtacgccttacttcctcatgttggccagcacgccgaattcgaccagtcaggatatcacttattccaaggcgtcggatccgcgcaacaatgcgaacgtcacgaccggcaagaaaaccaataacctgaccgaaggattctcgcagtggcgccgaattacctctcaggccagcatcagctataaaaatacctttgcggagaaacacaaagtcgatctgttggcgctgatcgaaacccgcgattacaagaccaataaattctcggcttcgggtaaggacattccgttcccgcaactgcccgaactggaccaagcgacgactccggcagataagccgataggcggttccagcgacgcttcgcgtaaggtcggactggttttccgcggacagtacaattatgccgataaatatctgttcgaattctcaggacgttatgacgggtcttataagtttatcggcaacgtttcgggacgccgctggggattcttcccttcggtatcgctcggatggcgcatgtcggaggagaacttcttcgctcccctgcgcaacgcggtcgacaacttcaaactccgtgcatcgttcggttccttgggcgacgactccggctcggcggcctatgctttcctgagcacgttctccaatgtcagtacggcaccgagcgtcgttctcggcggcgtggggcagaacggtatcatgacgtcgctggttgcgaacgaacttctgacttgggagcgtaattattcctacaacgtaggtttcgatctggcgatgtggagcggaaaactcggagtggagttcgatgctttctacaactatattttcgatattctgggatcgaacaccggaaaacccgcttcgatgggcggctattaccccacttacataaataacaatgcgcaggatgtaaagggtatcgacgtcaaactgactcatcgtaatcacatcggcaaagatttccagtatggcgtgaccgtcaatatgacttgggcgaaagatcgctggctccgttatcaggacagccccaatacgcccgattacgccaagcgcaccggcaagagccgctacatgacgatgggctttatgaccgacggcctgttccagagcgaagaggagatcgacaattcgccgtggatctccggctcgcgtccccgtgtgggcgatatcaaatacaaggatctcaacggcgacggcgccattacgtacgatcaggaccgcgcctatctcggccgcggccagcgtccgcagttcaacggcagtgtcaatctcaatgcttcgtggaaaggacttgaattcgatattctgtttgtcggggctgccgtttgcgacgtttcgctgacgggtacttattacaactggaatgaggacaatacgattttcacccgtccgttcaaggccggcgccaactcgccgcgttatctcgtagaaaaggcatggacgcccgaaaatcccaatgcggagtatccccgtctgtcgctcaatccgcctaacacgaacaactcctatgcttcgtcgttctggtaccgcgacggaaagtatctgcgtctgaaatcggttcatctgggctatacgctgcccaaaaactggaccaacaaactgcgcatccagaaggtgaaggtttatatcgagggcaataacctctgcacatggtcgggtctgcccgaaggcgtcgatcccgaatggccgggcgtgaccaacggttactatccgcagcagcgtacggttgtgggcggtctcgaagtttcgttctaaccgacaaaattcaaaatcatgaaaaagaaaatcataaatatcgttttgctggctgctacggtcgccatgacgggctgtaacgattggctcgacatgagtccgaccaacaaggtgtcggaaaagatcgtatggagcgacgtcaattatgtgactcagtatgtcaatgggttttatccctacatctcccggtacggggcgtttgagaccggcgacagtcaggtcggcctgacggacggcctgaccgagacgctcaagttcggttcggccacgccgggcacgaacgtggggtttgccaatatcatcgctttcgccgagggcggacttgccgcatcgacggccgctttccatttcggagcatgggatgatacctacactcgtatccgtcgcgtcaacgagttcctttacggactgaaaaaatacggaagcaatttcgacggcgacacttacaagcgtttcgaggcagaggcccggttcttccgcggattcctctatttccagttgctgaagcgcactccggaggtgattctctataacgaggatttgctggcgattaccgagaataaggccctctcgaccgaggaggaggggtggaatatggtcgaaggcgacctttcctatgccgccaagacccttccggccaaatgggacaacgaagcggggcgcattacttccggtgccgcgtatgcgatgctgtcgcgcgcgatgctctatgccaaacgctggcagtcggccaaaaccgcggccgaagaggtattcaaactcggttatgtgctgatgccgggcaaaacggccgccgattacgccaaggcgtttacctcgatgcgcgacggtaatacggagtcgattctggaatacaactatctggtcggcggcccgaaccatagctgggacaagctctttatgccgggcggcgacaatacgaccatgggcggacgggccactccgacgcaggagatggtcgaatcgtacgaactggcgacgacgggcggttatcccgactggacaccgtggcacaatacgacgaccggtacgaccgatacgccgccttatgcccaattggaaccccgtttccatgcttccgtgctttacaacgggtgcgaatggaaaggccgtgctctcgaaccttatgtgagcggtaaagacggctatgccgtttacgacgacggttcggcgctcaacggccgtacgaccacgggttattatctgcgcaaaatgctgaacgaaggttataccgactattcgaaagcctgtacgcagccttggatcgccattcgtctggccgaagtcattctgaatcacgccgaggcgtgctacatgctgggcgccgacggtgcgaacgacgacctgcgccagattcgggagcgcgtaggcctgccttactccaataagtccggcgaggcgctgatggcggcgatccggcaggagcggaagatcgaactttactgcgaaggacatcattattgggacatgcgccgctggaaactcgcgcatacggcttattccggtcagaacagccgcgtacacggtctcaaaatcgaaaagcagggtgccgagtttatttatacctacgtcgactgcgaccgtaaggaccgccttttcgaagagaagctttaccgtattccgctgcctgaaaccgagctgagcaacaattcggccgtcaagcagttccctgagtggttataatctctaaaagaaaccgaaaccatgaaaaatagcattaaattatttgcattggcggctctgctcggcttaggcggctgccatgagccggatgagctgaccccgtcggtcgtggatcaggggctgaacaccatctcggcgcagttcgctaccggggaatataaaaacgacccgctggcaaaattcaccgcggcggtgaccgagggacaggagcgtatcgtgatcgatgttccttactattatcccgaaaattcgtcgaataccacttcgattacccagatgcgcgtcacggctaatctggatgacaactgtttcatcacgccgatgcttggggtattggatctgacgaaggaaaactggtttacgctgacgcgtgtcgacggttcgaagcgcaatttctgcgtgacgggcaatatcaagaaatcggataaatgcgagatcatctctttcgccaccgacgaaccggctattcagggtgtgatcgataacgaccgtaacacgatttcactcattacggtcgatgacctttcgtcggtgacggcgcaggtgattctttctccccacgccacgatctcgcccgatcccgccgttgcggccaattacgagggcgagggcgtgaaatttacggttacggcgcatgacggcgtgaccaagcgggtttattccgtgagcaaggagattccgcccaagatcaaatacggttggcgtgcgggcagcgagacggaggtttggcagaacgtatcgctcgacaaactcggaatcgtcaatgccggcggtaagatctattcgctggcggcgtcgggcaacaagctcgtgctttcgaccggtgcggacaagttcctgttcaaccgcgcgacaggtgatttcttgggtacacacgacatgaagggcgtagcggccgacggcggtatgacctcggacgacgcgggcaacatcctctatgcgaacttggctaatcccaatgccgaattcaaggtttatgcggcggcatcgacggatgaaatgcctgccgagctgctctcctatacgaacgctacgggcgcttcgatgggcaagcacatttcggtgcagggcaacgtgaagggcgatgcgatcgttacggccgtgatctatacgtggaacggtgccgtttgcaagttcctccgctgggtgattaccggaggcgtgccggccaagccgcagatgatctcggttacgggggcgaccgccggctggaacggcaacggccacgccgacgtggaggcttattcggccaatcccgacgatccttacttccttgcctactacagtgccaatgcgctgtatcgtgtcgatgcgacgggcgctgtaacccacaagatcgccactgcgacatggggcgccaactccaactacaactgtgtggatgtatgtacgttcaataacgccaaatatgcggcgatttatgagggcgcgcatttcacctacggagagttcaaggcctacatgttcgatgtgacgacgcccgatcagatgacgggtgcgtgcgacacgtcgccgtcgaaggtcttcgtatcgaacgaatacaagcctgccggggcggtggtcaatgcggccggcgacgtgctgatgacggcatcggccgacggatacaagatgaatctctactatacggacgccaataccaatgcgctggtcgcttgggagttcgactgtatcgacaagtaacaccccttttgcctgcatccctctgaccggggatgcaggtcctaaaacaaacataattttgaagatgaaaaagaatgttaaatggtttgcggcggctctggtggcgctgacgctgggatacggggctgtttcgtgcggctcggattcgaaggagcccgaatgggagtggcccgatcccgacccggatcccgatccgcaaccgggagtggagaaaccccgcttcatctgggtcgatgccgcggccaacttccccgatttcgccaacagcaaggagaatatactgcgcgatctgaccaaggccaaggaggccggattcaccgatatcgtggtcgatgtgcggcctactaccggcgacgtgcttttccgtacgtcggtggtcgatcaggtggaatggctcggcgcatggctgccgggcggatattccaaggtcgaacgcacggccacgtgggactacctgcaggcgtttatcgacgccggaaagtcgctcgacctgcgcattcacgccgcgatcaatacctttacgggcggcaaccagaccttgctgggcggcgccggagtcgttttccgggatgaggccaagcgggcgtggacgaccgatctgaatctggcgggcggcatcacgaacatcatgtcaacctcgcagtccgccaagttcttcaatccggtattgcccgaagtgcaggagtatctctgttcgatgctcagggacctcgcggcctatgacggactggcgggaatcttcctcgacagggggcgcttcgacggatttaccagcgatttctcgaattatacgcgcaaggagttcgagaagtatatcggccagtcggttgccggtttccccgccgacattctgcctgccggccatacttcgggcataccctcgccggtgcccgtgcatatgaagcagtggctcgaattccgggcgaaggtgatccacgactttatggagaaggcgcgcgccgccgtcaagtcggtcaatccgtcggtcaagttcggcgtatacgtcggaggctggtatgccagctattacgacgtgggtgtcaactgggccagtcccaattacgacacctcgtccaaattctcgtgggctaccaagaaatacatgaactacggctatgccgacctgatggaccagatgctcatcggcgcctacgcctccccgacgcgcgtttacggcacgaccgaatggaccatgcagggattctgcctgctggccaaagagcgtacgatgggagcctgcccgatggtggccggcggtcccgacgtgggaaactgggatgccgacgacaaggtgccgcaggaggaggagaaccgggccatcaccgcttcggtcgccgcctgcatcaacgcctgcgacggttatttcctgttcgatatgattcacctgaaaaaagccgatcagtggtcgtatgtcaagaccggtatcgacggcgtaattaaaaaagactgattatgaaacgcatcgtcatattgtttctggccgcccttttcgcggcgtccggcgcttcggcgcagaaattccataacgcctactacgatacccgccgtgcggcccacgacgaagagggactgcaacagggggcgatcgtcttcctcggcaacagcattaccgaacaggggtggtggagcctgctgctcaaacgcggcgacgtcgagaaccgcggcatcggcggcgacaacactttcggcatgatcgaccgtctgcccgacatcctgaaaagcaagccccgcaaaatcttcctgatggcgggcatcaacgacctgacgggcgggcagcctgtcgatacgatcgtgatgaacattacccgcatggcggacatggtgcacgaagccgttcccggctgccggctctatatccagagcgtgctgccggtcaatacccggcggctggcatatcccggactcaaggggcacaatccgcaggtgcgggcgctcaatgcgcggctggtgcggttgtgcgacgccaagccgtggtgtacgttcgtcgatcttgcgccgctgctttccgatgccgacggcgagctgcgcatcgacctgacgaaggacggaatccacctccatcccgcgggatatgtgatctggaccgattacctcaagaaacagaaatacctgaaataacgtaacgtgcagatggaaaaacgagcttatacggtcgatttgctgcggggactggctatcgtgggaatggtgctgtcggggcagatcctgtggcacgccgaacttcctgcgtggctgtttcatgcgcaggtgccgccgccgtcgttccgcttcgacccgtcggtgccgggaattacgtgggtcgatctggtcttcccgtttttcctcttctcgatgggtgccgctttcccgctggccctgcgccggcggctggaacagcggggcgaatcggtggcgctgatcctgacggtcgtggcgcgcaggtgggcgttgctggcgcttttcgccatcgcgctcgccaacctgcgttccggagtgacgggaacgctgccgggatggggctcctcgctgctgcaactggcgggctggggctgtttctgtgcgcttttcatgcgcttcggccggctttcggaccggcagaaccgcatggtctgtctggccggcgtcgccggcatcgccgccctgctggcggccgcccggtggatctggggactgcccgtctcggcggagcggagcgacgtcatcattctggtccttgcgaatatggcgctgttcggcagtctggtgtggctctacacgcggaacaacctgctggcgcggttgggtgtgctggcgctgctggcggcactgcgtctgggcagcggcgtcgaaggttcgtggaacgaggcgttgtggaactggtcgcctgcgccgtggcttttccgcttcgactacctgaaatacctttgtatcatcattcccggcacgattgcgggagaccgtatctacgaatggatgacgcagagcggcgaagatgcgccgggggcgtcccggcggcgggaggtctggatactcgttctgctcgtgacgctgatatgcctgaatatgtgggggcttttcgcgcggcagctggtcgtgaatctcgcggcgggcgtcctgatctgtctcctgctccggcgtctgctgcgcggggacggctcggcgaccggaagactgcatggttcgcttttcggctggggatttttctggctgatgctgggactggcgctggaggcgttcgaagggggcatcaagaaggattacgcgacgttcagctattttttcgtcacctccgggctggcttcgtttgtcctgatcgccgccggaatcgcgatgcggcggctgaatgtgcgtttctcggcgctggtcaaatgcgggcagaatccgatggtggcctatacggcggccggattcctcatcatgcccctgctgacgctgctgcatctggcgccttatttacagacctttgccgagctatgcccgtggatgggcgtggtgcggggcgtgctggtcacggccgcggtcatggccgttacggtcttttttacgaaccgcaggcttttttggagaacctgatttgaaatttaaataaatgagttatgcgaataaaaggaacttttctcgacgaaatcagtcatgatattccccatcagaactggggcgaagccgaatgggaccgtgacttcggctacatgcgcgaagccggcatcgacaccgtgatcctgatccgctgcggctaccgccgctggcagacttttccctcgcgggtgctcacggccgaggaggggtgttacgaaccgcccgtcgatctggtcgatatgttcctgcgcctgagcgacaagtggggcatgaacttctggttcgggctctacgattcgggcaagtactgggaccgcggcgaatacgaacaggaggttgcgctgaacaaacgcgtgatcgacgaggtgtggagccgttacggacattacaaatcctttgcgggctggtatatttcgcaggaatgcagccgcaataccggcaagatcgtcgatctgtatgcgagtctgggacgctattgcaaggaggtttccggcggtctgccgaccatgatttccccttatatcgacggcagcaagaacgtcagccagtacaatgcttcgacttcgaagcagaacgtcgtgacgctcgaaagccatgaacgcgagtgggacgccatcttcgccggaatcaagggcgccgtggatatcgtcgcctttcaggacggccatgtggagtatgacgagctggtcgattttctgaaagtcaacaagaaactggccgaccgttacgggctggagtgctggaccaattccgagaccttcgaccgcgacatgccgatcaagttcctgccgatcaagtgggagaaactgcggctcaagatggggctggcggctcaggccggttaccagaacgccattacgttcgagttctcgcacttcatgagtccgcagtcggcctacctgcaggcggggcacctgtacgaccgttatatggagtatctgaaaaccttggaatagagaccgatgaacggacattaccctaaaccgggcggtttggcggcggcgttggccgtgctgatcgcagtcgtgctggcggcctgctccccgaagggtgcggcgggcggcgacgcggcctgcggcctgtcggacgacgatttcagaacagaaggcattctccaagcgattcccgttcgtgcgacgttcctcgacgaggtgagctgggacattccccaccagaactggggcgtcagggagtgggacgccgatttccgggcgatgaaaaacatggggatcaacaccgtggtgctgatccgcgccgggctgggacggtggatcgccgcgccgttcgagtgcctgctcgaaagcgaagaggtgtactatcccccggtcgatctggtggagatgttccttacgctggccgacaaatacgatatggcgttctatttcggcatgtacgattcgggcaaatactggcaggagggactcttccagcgcgagatagacctgaacctgaaactgatcgacgaggtgtgggccagatacggccaccacgagtcgtttcaggggtggtatctgtcgcaggagatcagccgccggaccaagaacatgtcgcgcatctatgcggaagtgggccgccatgccaaggcggtttcgggcggtctgaaaacgatgatttcaccctacatctacggcgtcaagaccgatcaggtgatggcgggcgacaaggccctttcggtcgaagagcaccgccgcgagtggaacgagatactgggcaatgtcgccggagcggtggacatcctcgcgtttcaggacgggcaggtcgattaccacgagttgtacgactatctggtggtgaacaaggcgctggccgacaagtacggcatggagtgctggaccaacatcgagtcgttcgaccgcgacatgccgatccgcttcctgccgatcaagtgggagaagctgctgctgaagctggacgccgcacggcgggacatctttacgatcgctactgcgattattttaaaatcgacaacccttaccggaaacggtaaatatactccatgaaacggcgcggcaacatatcctacatgctttttcttgcggtcacggcggccgtgggcggactcctgttcgggtacgacacggccgtgattttcggcaccgtcgagctggtgacggcccgcttcgggctggacagcctgcagcaggggtggtatgtggggtgtgcgctggccggctcgatcgccggcgtactctgtgcgggcgtgctgagcgaccggctgggccgcaggcggacgatgctcgtctcggccgtgctgttcacggtgtcggccgcggggtgcgccctttgcgccgatttcacgcaactggtcgtctaccggatcgtgggcgggctgggcatcggcgtcgtttcggtcgtctcgccgctttacatctccgaggtgtcggcggcgcgccgtaggggcatgctggtgtcgttttaccagctggccgtcacgatgggatttctggcggcctatacggtcaattacctgctgctccgcatgggacagaccgccggtttcgaaacggcgtggatgcagcggatcttcgtcgatgaagtgtggcggggcatgctgggagccgaaacccttccggcgctggttttcttcgtcatcatcttctttattcccgaaagtccgcgctggctggcgctgcgcggacatacggaccgcgccctgcgtgtgctcggccgcatcaacggcgaccgggcggaagccgccgccgaacttgcggccatcgaaacggccgtcggcggcgggcaggccccgcagtggcggctcctgctgtcgaaaggcatccggacggcggtgctcgtcggtgcggcgatcgccattctcggacagttcatgggcgtcaatgccgtgctttactacgggccgtcgattttcgagcgggccggatggtcgggcagcgactcgctgttcgcccagatactggtcggagcggtcaatatgcttacgacggtgctggcgctggcgatcatcgaccgcgtagggcgcaagaagctggtttactggggtgtgtcgggtatggtgctgtcgctgctgcttatcgggacctgtttcctgaccggtgagcggtcggggatgccggacggcgtactgctggcggcgttcctgtgctatattttctgctgcgccatctccgtttgcgccgtggtatgggtgcttttgtcggagatgtatccgattcgtgtgcgcggcgcggcgatgtcgatcgcgggtttcgcactttgggtggggacctatctggtcgggcagcttacgccgtggatgctcgcgaacctgacgccggcggggacctttttcctctttgccgcgatgtgcgtgccctatatgctgctgatatggaaggcggtgccggagacgtcgggccgcacgctcgaagagatcgaacgatactggacaagataacaatataaatcagataagattatggacttcaaaagattagcggaacagtacaaaaccgaattgctggatggcgtactgcctttctggctcgaaaaatcgcaagatagggaattcggcggctattttacgtgtctcgatcgtgacggaagcgtctacgataccgacaaattcatctggctgcaggggcgcgaagtgtggatgttcgccatgctctataacaaggtggagcgtcgccccgaatggctcgaatgcgccgtgcagggggctgagttcctgcgcaaatacggccacgacggcaactacaactggtattttgcgctgacgcgcgaaggccgcccgctggtgcagccctataatattttctcctatacgttcgcggcgatggcttttgcgcaggtcgccgttgcgacgggcagcgacgagtacgccctgatcgcaaagcggactttcgaccggattctggagaaacgcgccaatcccaagggcgagtggtgcaaggcttatcccggaacgcgttcgctcaagagcttcgccctgccgatgatcctctgcaacatggcgctggagatcgagccgatgatcgacaaacaactgttggccgacaccatcggggagtgcctgcacgaagtgatggaggtgttttaccgggaagagctggggctgatcgtcgagaacgtcacggaggacggacggctttccgatacgttcgagggccgtcagatgaatcccggacattcgctcgaagcgatgtggttcatcatgaacctcggcgtgcgtctcgacgaccgtgcgctgattgacaaagcggtgaaaatcgcgctcaataccgccgaatacggctgggacaaggagtacggcggcattttttattttctggaccgcaagggcgcgccccgcgtggagctggaatgggaccagaagctctggtgggtgcatatcgaatcgacgatcgcgatgatcaagggctatcagctgaccggatcgaaggagtgtctggagtggttcgggaaactgcacgaatatacgtgggcgcatttcaaggacacggagcatcccgaatggttcggttacctgaaccgccgcggcgaggtgctgctgccgctcaagggcgggaagtggaagggatgtttccatgtgccgcgcgggctgttccagtgctggcagattctcgaacaatgcaaatagaactaaaatacggaacgatgaaaagatatttactgacaattctgttgtcgttgtggtgcgcctgcgcatgggccgcgggcagcgtcacggtcaaggggcgcgtcctttgcggcggccggggcgtggaaggcgtctgggtctccgacggcgaagagttcgcgtgcaccgacaaaagaggaaattacagactgcaggccggcgccgacaaccgcttcgtcttcgtttgcgtacctgcgggctacgacgctccggtggaaaagggcgtggtgcgctattttcacccgctgccggccgacggcaaatcctgcgattttacgctgctccgccgtgcgggcgacgattcgcgttacgggttcatcgccattgccgatccgcagatatgggcgccgaaggagtttgcgaaactcgcggcggcggccgacgacatcgctgctacggtccgcagttacggcggcatgcctttccacggcatctgctgcggcgacatcgtgtcgcacgaccattcgctttacggccggtacaacgaagtgatggagcgtacgggaatcacgttccgcaacgcgatgggcaaccacgacatgaaggtctacggacgctcttacgaaacctccttctcgaagttcgagcagatgtacggtccggtctactattcgttcgacgtcggacgcatccactatgtggtgctcgacgacaacttcttcatcgggcgcgactatttttacatcggctatctcgaagagcggcagatgcgctggctcgaaaaggaccttgcccgcgtgcagcccggttcgacggtggtcgtctgcctgcatatcccttcgacctgcgaggagcaggaccgcaagcagttccgctacgaccgcgccggatcgacgatgaccaaccacagggggctttacgaaattctgaaaccctaccgggcgcatatcatttcgggccatacccatacgaccttcaaccagccgatcgcgcccggcctctacgagcatgtgacacccgccctgagcggcgcatggtggcagggtccgctctgcaccgacggtacgcccgccgggtacggcgtctatgaggtgaacggcgaccggatcgactggtattacaaatcgacgggttatccggccgactaccagatgaaaatttacagcggtcgcgaatatccccagttcgaagggtacgccgtggccaacgtctgggccagcgacccggcgtgggaagtccagtttacgatcgacggcgtgccgtgcggtcccgccgagcggtttcaggcttacgatcccgccgcgaaacagatgtactccgacaccagtcagatggaccacaaatggatttacccttcgatttcggaccactattaccgcgtcgcgctgcccgaaggggcgaagcgcgtcgaggtgtcggctacagaccgcttcgggcggatcagccgggccgcagccgatttgaaataaatgaccgaatatgagatttaccggactgaaatatttgcagctgctggcgtgcttggggctgtttgcgtgcggttccgccgagcgttacgacgtggtgatcgtcggcgggggagcgagcggaacggcggccggactgcaggcggcccgcatgggggcgcgaaccttgatcgtcgaggagttcgactggctcggcggcatgctcacctcggcgggcgtgagcgccaccgacggcaattaccgcctgcgcggcggcatctgggacgagttccggacggagctggcccggcattacggctgcgattcggccttgataacggggtgggtcagcaacgtgatgttcgaaccttcggtgggcgacagtattttcaaacggctcgtcgcccgcgaaccgaacctcaccgtgtggtaccgttcggcggccgagacggccgaacgcgggaaggatgtatggcggctgggtgtccggcgtgacggccggctccggccggtcgaagccgacgtgctcgtcgatgcgacggagctgggcgacgtcgcccggatggcgggcgtcccctatgacgtcggcatggattcgtcggccgtcacgcacgaggatatcgccccggccgaagccaacggcatcgtgcaggacctgacctacgtcgccgtactgaaggattacggccgcgacgtcacgattccgcggcccgacgggtacgatccgtcgcttttcgcctgctgctgcgtgaacgacctctgcatcgctccgaaggaaccgcatcgcatgtggtcccgcgagatgatgattacctacggaaaactgcccgacggcaaatacatgatcaactggccgatcgagggcaacgattactacgtggacatgatcgacatgacgcccgaagagcgggccgacgccgtccgcagggccaagaatcatacgctgtcattcgtctatttcctccagcatgagctgggattcaatacgttgggattggccgacgacgagttccctacggaggaccggctgccgttcattccctatcaccgcgaatcgcggcgcattcatggggccgtgcgttttacgctcaacgacatcaccgacccctacgcaggaacgctttaccgtacggcggtcggcgtgggcgattatccggtcgatcagcaccatacccgctattcgggctgggacgaactgcccgacctctatttccatcccatcccctcgtacggttttccgctgggcatcgtgatccccgcaggatttccggggttgctcgtagccgaaaaatcggtgtcggtaaccaacctcgtcaacggctccacgcgcctgcaacccgtcgtgttgcagatcgggcaggcaacgggagccttggcggcgttggccgcggcggcgggcgtcgatccgtccgaagtcgcggtgcgcagggtgcaggaggcggtgctcgatgcgggcggctacctgctgccgtacctcgacctgccggccgacgatccgcgcttcggggcgatgcagcggatcggcgtgaccggaatcctcaaggggcgcggagccaacgtcggctgggagaaccagacttggttcgacgccgatcggacgatcgcggaatccgaactgcgcgaagggctgcgtgaagtctatccgtcggtccggccctccgttctggaaacgccggtcgatggggcgctcctgacggcgatgctggcagaagcgctcggcaagccggccggggatgttgcggcgcggacggagcgtgccgccgccggactgctgtccggttacgatccggcgcgtccgctcacgcggctcgaatgcgcgctgctgatcgacgcggtggccgatcctttccatgcggccgaagtcgatatttacgggaactacaaacgaaaatagcttttaatttttcatgaaaaaactgctgactgtatgcctgctggcctttgccgcggcaggtgcgaccggctgccggagtgccgccgagggggtgaaacccaaactgatgtggctcgactgttcggccaactgggtgcgtttcagttaccccgattcgatccgttattatgtgaacaagtgccgggaggccggcatgacggcgctggtgctcgacgtcaagggcacttcgagcgaagtggtatatcccagcgagcatgcgccccaagtccgggagtggaaagggtttgtccgccccgatttcgatttcgtgggtactttcgtcgaagctgcgcacgatgccggactggagatttacggttcgttcaacacctttgccgaaggcaatggcgtattccgtcgcggactgatctacgacgggcatcctgaatggcaggccgtgaactatgtccccggcaggggactggtgccccagctggagattccggagaagaaggtgctgttcgccaatcccgcgctcccggccgttcaggatcacgaaatcgccattttcaaggaggtggcgcagaagtacgatttcgacggtctgctgcttgaccgcggccgttacgacaatatccagtccgacttctcggatttctcgcgcgggaaattcgaggcttatatcgggaaaaagctggagcggttcccggaggatatctatacgtgggaggaggacggcgacggcggctggaaacgcatcgacggcccttatttcaagcagtggatcgagtggcgcgcgtcggtgatctacgacttcttcaaacgcaccaaagaggagctgaaagccgtgaagcccggcctgaagttcggcgcttatacgggtgcgtggtacccctcctatttcgaagtgggcgtcaattgggccagcaatacgtacgatccttcgcaggatttcgcatgggccacgcccgattataagaattacggatatgccgaactgctggacatcttcaccaacggcaattattactggaacgtgaccatcgacgagtaccgtcgcagcaacggcctgcataagaacgagaccgacagcgaaatgtcgaagggcgaccacctcagcgtcgagggcgggtgccgctattcgcgccgtctgctgggcggcagacccttcttcggcgggatgtacgtcgaggactacaaacgcgatacgacccagttcaagcgggccgtggagatgaatctccgcgaatcggacggactgatggtgttcgacatcgtgcatatcatcaaccgcgactggtggggaccgctgcagcgggctgtcagcgcctatgaagcggaggcgaagcaatgagcagacggctgatttttgcagcgctggcgctgttgtgcgccggcgccgtttccgcccagaagcggacggaggcgcccgccgcgtcgtccgaagtgcgctatgtcggacgtacgcagacgaagggcggcgacgtgagtttcgactggagcggaaccagcttcgagtgccgttttacgggcggttcgctggccatgcgcgtttcggatacgaaaaagaactactacaacctgaccgtcgacggccgcgacgccggcgtcgttacgacgttcgggacggattcggtcgtggtgctggccgagaagctgggccgcggcgaacataccgtgcggatgcagaagcgcaccgagggcgagcaggggcgtacgacgatccatgccttcctgctcgacaggggaggacgtctgctgccagcctcgcccgcgcccggacggcatatcgaatttatcggcaactcgctgacctgcggttacgggaccgaggggctttcgaaggacgagccgttcaaaccccagaccgagaactgcaacaaggcgtacgcctgcatcatcgcccgttatttcggcgccgactatacgctgatcgcccattcgggacgcggcgcggcgcgcaattacggcgataagaacaccacttcgcagaatacgatggccgaccgcatcgccaatacgttcgacgaggcggcggaaccggcgtgggacttcgcggcgtcgccgtaccgtcccgatctggtcgtcatcaatctgggatcgaacgacttctcgaccctgccgcatccttcgcgcgatgagtttgcggccgcctacacccgcatcctgcagactctgcgcggcgcctacggcgacgaaatgccgatcctctgcgtggcgccgcgcgtcagcgaaccggccttcacctatatccgcgacctgtgtcagtccgccgtcgtgccgaacctccatttcgcggccatcctgcccggctactgcaacgacggaagcgagctcggatcgtcggcccatcccaattacgccggccagcgcaagatggcgatgctgctgatcccctacgtttcgacgctgacgggatgggaggcggagatcaaaccggtcgaataggcgtttggccgtatcgcggctttttgctacttttgtccccgattaggaacggagtagcgaattatggaatctcacaagaacaaattgccctcggcatgggtgtcggcgctgccgctcgcagtgctgacactccttttatatgtggtcatccgctgtttcgggggcgatgcgataaacggcggaagccagatcgcgctgctctcggccacgtcggtctgcgtgatgctctcgatcggcatctaccgctgcaagtggtcggtgcttgaagatgcgatcatcgacaacatacgcgcctcggcgtcggccatcatcattctgctgctgatcggcgccatcgccggatcgtggatggtgagcggcgtggtgccgacgatgatctattacgggctgaaaatcttgcatccctcgttttttctcgtcgcctcgtgcgtcatctgcgccggcgtgtcgctgatgaccggcagctcgtggacgacgatcgccacgatcggcgtggcgctgatgggcatcgggcaggcgatgggctttcccgaagggtggatcgcgggcgcgatcatttcgggggcctatttcggcgacaagatttcgctgctctccgatacgacggtgctcgcttcgtccaccgtcggcgtgccgatcttcacgcatatccgctatatgctttacacgaccgttccgtcgttcgtcgtcgcgctggcggtcttcgtcgtcgcggggctgacgctgagccataccagcggcgcgcatgccgaactttacgccgattcgctgcgcggcgctttccgcattacgccgtggctgctgctggtgcccgtggcgacgggcgtgctgatcgtgcggaaacttccggccatcgtgacgcttttctgcgccgcggtcttcgcctgcgtcgccatgctgctggcgcagcccgaactggtggtgagggtggccggagtcgaagggctgaacttcatgtcgggattcaaaggcgtgctgatgagctgtttcgggcctacggcgctggagaccggaagcccgcagctcgacgagctggtggccacgcgcggcatggccggcatgctcaataccgtatggctcattatctgcgccatgtgcttcggcggcgtgatgaccggcagcggcatgctgggttcgctgacggccgttttcctgaaattcgtccgtcatagcttctcggccgtggcttcgacggtcggggccggaatcttcttcaacctctgcaccgccgaccagtatatctcgatcatcctttcgggccgtctgttccgggaactctatgccgaacgggggctggaatcccgtctgctgagccgctcggtcgaggattcggcgacggtctgttcggtgctcgtgccgtggaactcgtgcggcatgacgcaggccacggtgctgggcgtctcgacgttcgtctacatgccttactgtatcttcaatatcgtcagtccgctgatgtcgctgtgcgtggcggctctcggctggaaaatcaaaaaggccgcatcttctgccggccgcagacaatgattatggaaacgactgtaaataccgatctggtcatcttcgacctcgacggcacgctgctcgatacgatcggcgatctggccgtcgcctgcaacgccgttctggccctgcgcggccttccgcagcactcctacgaggagtactgccatttcgtcggcaacggcatcatgcggctcgtggagcgcgcgctgcccgaagagcttcgcacgccctataccgtagcggccgtgcgcgccgatttcgtgaaatactataccgagcatatcgacgcctacaccaagccttacgacaggattccggagctggtcgccggactcgtgcggcgcggcgtgcgtatcgccgtggcgtcgaacaaatttcaggcgggcaccgagaaactcgtccggctgtttttccccgacgttcctttcgccgcggtcttcggccagcgcgaaggggtgcctctgaagccggatccggccgtggtggaggagattctctcgctgacgggcgcggcgaaggagcgggtgctctacgtcggcgattcgggcgtggacatgcagaccgccgcggctgcgggcgtacgctcggtgggcgtcacgtggggatttcgggatcgggaagagcttgtcgaatccggagccgctcatatcgtcgataaacctgcggaaatcctcgatctgctgtaatcgggcagttcggttcgaaaaagcgacaaccggtccgtaagggccggttgtcgctttttcagcagtaggtcttcacgtcgtcgagcgtgatgcgctctttgctgaggatgatgagccgctctatgacgttgcgcagttcgcggatgttgccgctccaccgcatcgcctgcagttcgcgcagggcgttgctctcgatgcgtttgggcgggatgccgtattcggcgcagatcgtgcggatgaaatggtcggccagcagcgggacgtcctgcgcgtggtcgcgcagcgccggaacgcgcaccacgatcacgccgatacggtggtagaggtcttcgcggaagttgcccttcgtgatctcgtcgcgcaggttcttgttcgtggcggcgatcacccgcacgtccacgtcgatgtccttgtcgctgcccacgcggcagatcttgttctcctgcagcgcgcgcagcaccttggcctgcgccgccagcgacatgtcgccgatctcgtccatgaagagcgtgccgccgtcggcctgctcgaatttgcctttgcgctgtttgatcgccgaggtgaaggcacccttctcgtgtccgaagagttcgctttcgatcagctccgaggggatggccgcgcagttcacctcgacgaacggcgccgcggcgcgcgagcttttggcgtgcagccagcgggcgacaagctctttgccggtgccgttttcgcccgtgatcagtacgcgcgcctcgcacggcgccaccttgtcgatcagctggcgtacgtgttccatctgcggcgaggtgccgatgatttgttccgtatgcatattgcgcgaacggcgcgagcggcgtgcgggagctgccgcgggtgcgcaggcgggtgcgggcgccgggttgtcgatggtgcggtgtatggactgcagcaggcggttcatgtcgatgggcttggtgaggtaatcctgcgcaccgttgcgtacggcttcgaccgccgagtcgatcgacgcttccgccgaaagaacgatgaacgggattccggcgtcgggaatcttgcagccccggtccgaaaggatgacgtcgaacggtattttctcgcacatcgtcgatgcagcctcctcatcttcggcggcttcggtcgagaagccttcgaattcgagacgctcgcggagcgtgtttcgcatactttttgattggtccagaattaaaacctttgccatagcttgtttttactgaaattttacctacttttgtcccaaagttatgactttctgcggtgcaaaaccaatcttgaggggccttgccgaacagggcggagagtcggataaaacgtcttgaatcggtccatcgcgacaaccccgccggacgctccggcggccgttttgcaacagtgccgaggaccacaattacaatatgaaaaagaattacaattacacacgacgcaagttgtacctgcccgaatacggacggcatattcaggagatgatcgactcgctgcagctgatcgaggaccgccgcgagcgcaaccgtcaggcccgtgccgtgatcgccgtgatgggcaatctcaacccgctgctgcgcgataccgccgatttcacccataagctgtgggaccacctctttatcatgtctgattttcagctcgatgtggattccccctatccgcagccgacccgtcaggaactgactatcacgccgcgtcgcatggcctattcgcagggacgcatctccttcaagcactacggcaaatacgtcgagcggatgatccggagtcttgccggcgacaaggaccgcagggaggtgtcgcgcacggtggacaatctggcccggtacatgcgctcgaagagctacgaatacaatcaggagcatcccaacaacgaagtgatcgttaaagacatcaaacgcatgtccgggggtgctattgaaatagatgaagttgctttaaacaatctccgaagcgactataaacagcactttacggcacgtccccagaaaggtccccagcagcgcaatcagcagcgtcagcagaaaaaccgcaatcagcagcacaaccgcaatttttcgaaaaacaacggtccgcaccgcaattcgtcgaaataagaggtgcgtattttcggaaatttgctatatttgtgagcattttactgcagaaacgtgagattaatgaacaaacaaacgcttttcgtctccctgaccgcggccgtcttgttgtgtgcctgccagtcgtcgaaggtgaagatttcaggccgcatcgtcggcaacgacgccaaaaatgtttacttggagcaggtgtctcccctgtcgcagtcggtcatcgactcggccgtgctcgacaaggagggtaattaccgtttcgagctgaagggcgtgacccggacgccttcgctttacaatataatttacaacggcgaacgtattccgctctttctggcgggcggcgaccgcttgtccgtgaattccgtgggcagtttcatccgcaactatacggtcgaagggtcgaaggagaccgagctgctgcggcagttctatcaggctttcgtcggcggcgcccagcggctcgacaacatcgccggccagttcgcccggacgaacctctccgaggaggagcgcaaggcgctggtgaaggagtataccgacgaatactaccgcatccgccgcgaacagctgcgcttcatcatcgaaaacaagtcttcgctggcggcggtttatgccctgtaccagcggttgccgggcgacacctatctgttcaacggtgacagcgacgtggtttattaccgcacggtggctgaagcgctcgaacaatcctatcccgattcgccttacctgcagtcgctgctggccgagattacgcgcatggacgcccgcatcagcctgacgtcgcgcatctccgaagcggggtatcccgatctggaactctcggacatttacggcaagaaggtgcggctctcgtcgctgacgggcaaggtcgtgctgctggacttctggtcggccgaactgggcaacagcaatacgctcaatgccgagctgaaggaggtctacaagaaatacgccgacgctccgacgccgttcgaggtctatcaggtggccgtcgattcgtcgaaacccctttggatcaccgccgtgcaggagcagcagctgccttggatctcggtgagcgatctgcgcggtcaggcttcgacggcgccccggctctacaacgtgcagaaacttccggccaatttcctgatcgaccgggagggcacgatcgtggccaaggatatttacggcaagagtcttgagcggaagctcgacgaactgacgaaatagggcgtgtccgaatcccggatgctttccggctgcgctcggacaaacctcggaaaatgcggcgttttgccgtgcgagtccccggcaacggggattcggtcaattgtttagaacgatttatgaaccattatttcgcatccgacatccatctgggcgcaggcggcgaggcgttcgccggggaaaccgaacgccgtttcgtggcttggctcgacgatgcggcgaaggatgcggagtcgatatttctggtcggcgaccttttcgacttctggttcgaataccgcgaggtcgtgccgaagggcttcgtgcggacgctgggcaagctggccgagctgaccgaccggggcgtgcgggtcgtcttttttaccggaaaccatgatatgtgggtcggcgactacctcgcccgcgaatgcggcgtcgaagtctacacttcgccgcagcggttctgcctgaacggcaaacatctctttatcgcccacggcgacaacatgaagatcgacggacagccggtgctcaaactgctcaacaccgtattccgttcgcggacgctgcgctggctcttttcgtggctgctgcatcccgactgggcgatgcgtttcggccattggtggagcggcaagtcgcgcaagtcgcacgccgccgacaccctcgacgtctcgcttaccgagccgctgatccaatacgcccgcgaatatgccgccatgcacgatgtcgatcatttcgttttcgggcatatgcacttcccgcgcgacttccgcgaagggaatctgcatgtgataaacctcggctgctgggaacagtatccctcttatgccgttttggacgcgtcgggcgaactgacgctgagaaggctcgaagcgttccgttagtgcgggggcgcggggcggcccgctgctccgcgcggaagaaatgtctatttgagcggaaaaaatgtctattaaagaagaacgatgaaacaatacctcgatctgctgcgcaggatcaagaccgaaggcgtcgtgcgcggcgaccgtaccggcaccggtaccaaaggcgtcttcggacatcagatgcgcttcgatctggcggagggctttcccctgctgacgaccaaaaaagtatttctgaagggcgtgatccacgaactgctctggttcttggccggcgataccaatataaaatacctcgtggacaacggggtgcatatctgggataacgatgcattccgctattacaacgagctttgcgtgcgccacggcgtgctgcctgtcgaccgcgacacgtttctgcgggcggcgcaggagggagtcgaatcgccggtcgaagggtataaattcggcgatctgaaccacgtttacggctatcagtggcgcagctggcccaagcccgacggcaccgtcgtcgatcagatcgcgcaggcggtcgggcttatcaggagcaatcccgaatcgcggcgcattctcgtctccgcatggaacgtcgccgaggtggaggatatggccctgccgccgtgccatgtgctgttccagttctacgtggccgaaggaaaactctcgtgccagctttaccagcgcagtgccgatacgtttctgggcgtgccgttcaatatcgcctcctatgccctgctgacgttgatgacggcgcaggtctgcggcctgcagcccggcgaattcgtccatacgctcggcgacacgcacctctatctgaaccatctggagcaggtggacgaacagcttgcgcgcgaaccccgtccgctgcccgtaatgcggctcaatcctgccgtaaagtcgctcttcgacttccgctacggggatttcacgctcgaaggctacgatccgtggccggcgatcaaggcgccgatgtcgttctgaatcgtttcgctcccggcaggggcggcgaatcactttcgcgctgatccgccggaaccgaaaaacaacaggcgtcccctttgcagggacgcctgttttcgctgactgtttcgctgaccgttatttccggacgatgctgattttccccggcttcttgtagcggttgtttttgatgacgacctgctgcgagctgcggatgtcgatcgtcgggaggtcgttgtaaggcttgtacttctccgataattcgatggtgttgtctctgaaaatcagtcctccgacggatttcgcccggagcagctgctcgttgaaggtccggaacagattgccttcgatggtgatgttgcgttcgtagggatggcccggaacctcttttttctggtgcgggttgatgaagatcgtcgggaaatcggcgccgccgtatgtgccgtcgagaaacctgttgttgcggatcgtcacgtcgcgcacggctcccgattcgtaccagtggtccatgtccccctcgaacagaatggcggacatcatggacgagaaggtgttgccctcgacgacgactttccggggcgtgctgaccagaatgcttctcgcccggttgttgcgcacgacgttgttccggaagatcagttccgggtaccacgacatgttttccagcccgtcgccgaccgtgagtcggccttcgacgggagcggtgaacgtcagccggatgtaatgggcgttgatgcgttccgattttttcacccgcagggtgtgtttcgcaagcagggtctccgcgtccacgacgtcgatttcgtcgccctttccggcaaactcatacccggcctgctgggggtggttgatgcgggcgatgacctgatcgggcgccgtgatgccggtcacgcggacgtaggagccgtgtacgttggtcgcatcgtcgagcatgttctcgaaaacgcactcttcgatcaggacggttccccggcagttgcagaagtgggtggcgtccgccgtggtcgttatcatccgggggcttcccttccgcaggaccacctgcagcctgcggacggttacgttgtcggccttttcggcgatcagccccatgccgccgcagtggtggatggtgacatcctcgaccagaacgccggacgacgcagtcgcgtggatggcgggcgaatgccggttctgggtaaagacgcctttgaacgtcaggatcgttccgacgggcggcagggcgcgcacgaaccgggtgtggagttcatagcggccgggagccgtcggcgtaacccgtatgtcgaagttgtccggcttggggatgtagtaatcgtcgctgcggtaggcggtggccatggtgcggggatcgaaaacgatgttctcgcccggaatacgctcttcccagccttctgcccgcatgatgagcttgccgttttcgaccgcatggccgaactcgtccggaatctcgatctcgacacgctgcgtctccgcatccgcggtcgtcaccttcgcctccagcgtgaagggaacctcccagtctacggtgaaattgcgcagcgtcacgccgtgcgaatcctcgatcagaaacgggatgatccggccgtggaaaatgaattccgagccgccgccgtcgatctcgatgttccgccgtcccgtcagcgggaatgcgaaatggcggtatccgttgtcgtggttggtgatgcagtggtattttccggcggcgaattccggccggaaatggtaggtgccttcgggaaataccagttttaccggcttgtctgccgggatgctttcgagcagggtgtagacgaacggagtcatgtcctgcgtgtcgtacctgcctttgtagtccgcgatatcgattactccggttcgggcggatgccgtaccgcagaccatactcacgaggagtatgaccgttcccaagcgtggtttcatgcgcatggctatttctttatgttgttcttttcccagaccggcgcacccgtgtcggcgccgtaccgttctccgtggctgcgcgtcacctcttttgagttttcgacctcgttgtccgacattttcagtccgtccaccgacgtgactgcgattgccgggcaggggcagccggtcaccttgttcttctggacggtgatgtttatgaatgcgcccggttccgcgaccttcgcgtcgcccgtgatgtagaagagcgacagcgctccgggaggtatgcgcggattgccgcgttcgaacatgcactcctcgatcgtattgccgacgatctgcacgttcgaggagaagccgcctcccatccattcgatttcgggcgacatgaggattccctgcatggcgcatccggttatcctgttcgacgccaccactccgtcgatgcccttgatcaggattccgcgcgagcgtacgtgacccacttcgttgtctttgacgaggaatccgctgccgacggcgtcggcgttgaaaaccacgtcgccggggccgatttcgaacggcatctgcttcaccttgagccggaatccgagcttgtaggaggcttttgacagcagcgagggataacccgtcgtcacggcgttgcgctgctcttcggtcgggtcgaagcggctgactgaaaccagccggagttcgcctttgcgtttcccgtcgtaaccgaccacgaccagtctgtcgccgcgccggaatacggggtgggtttcgcgcgtcaccaagtcgatcgtacccttcgcggcgtcggccgatccgaccgggaacgagcgtccgcagacgatgatgcagtcgtcgccgttgtggcctaccttgcaccccgtgacggtcgggcctttccgtgcctgactgctgtggatgccgtcggcgttgcccgaacgcaggcggggcctgatgccctgcggcatggggcctcggtctacgacgcagtttctgtactcgttggcgtagccctccttctcgaaaaacgagaaggtgttggacccgtataccgtgacgttttcgagtttggtgttgtagcacttgttgagcatgacggtatggacgccggcgttcggcttgtcggtcttgacgtccatgaccaccagatccccgacctgctcgcctgcgctccacgttccgttcttgacggcccggaagaggttgtgaccgagctgtttgagtgcggagtagttgctcgtgtaggtggtgatgctgttgcgcttgagcaggcgtgtctgcggatcgtagaactgcacgcggttggcggccagaccggttacgggatacccctcgtcgatccggacgtcgaaccagcttccgtcttcggctacggccgtaatctcgccctgcgtaaagcagagcggatcgtagtcgatggtcaggtcgcgcagctccacccgcacgcagttgtaaaagctgaacgcctgctcctgattgttgcagatgaccgtcgatccgttgccgttgatgtggacgtcggtcaggttgtggaacttgtacggcccgttgctgcgcacgtcgagcgtgtaggtgcctttgggtatttcgatgaggttccggcctttctgccggtcgaggacctcgtgaagatcgggatgattctgcgccgccgcggatgccgcgagacatgcggcggcacagaaaacagtcagttttttcatctcaacagggttcgttgtcggagttcgtccgcaggaatcgtcagatcgtctgcgtgtaccccggattctggctcaggtttttgttcacttcgcgttcgcgcttgggcaccggcatccagatcttgtacggtttgtaattgttcttgatcggctccatctgcggggcgaagtagtagtatttgttgccggcgtcgttgacggttttcatgttgccgatgacctccgtcattttgcccgtgcggatcaggtcgatgcgtcgccacccctcgacgcagagttcgcgcgaacgttcgtcgagcagctcttccatgaagtcggtcttgtagtaggccgaattcatggcgttgagcgccgattcgtccagtttgccgtccgtatcggtgcaggcgcgttcgcgcacctcctcgaccagttcgcgcgcaagggattcgtcgcccgtcttgtaaagcgcttcggcgtacagcagaacgatgtcggcgaagcggagcatcgggaagtcgatgttgcttgcccacgtcggaatgccctgcgacgttctggccgcggggtccgattggcggaatttgccgtggcagaggttggcgcccgatgcgtaaagcgccacgggactgaaatatttggctccgttgatcgtcgtgtagtcggtgacgttgttgcccagactgccgcagaggttccagcccatgcggctgtcctcggtcacgtatttgtccgacagctcgcccgtcgggcgtatccagccgtaaccgcctccgttggtaccgacgttgccctgcggcccggcccagtaggcgaagaggaaatattcgttcgagccgcccgctccggtctgtacgaccatcatgcactcctctttctgactgcttttggtgtcggccagaaagttgtagtggtagggcttgatgagcttgtagccgctgtgtgcgtaaatatcttcggcgatggccgcggctttctgccagcacgcttcggcatcgacccagtcgaaactgttggtcggcgagccgagttcctgccctacgcggttctccttgcaggaggccagataggtatacatcttgagcagatagccgcccgcggtccatttgttgacgcggccgtttacgttcgaattgcggtcgggaagctccttgtaggctttgtcgaggtcttcctcgatgcaggcgtaaaccttgtcgagcggttcgcgcggagcctcggccgacgagttgggcgtattgggcaggggcacttcgccccagagccacgcctgatagagccggtaaaggccgcgcagcagcttcgcttcgttgacgatctcgtcgcggcgtttgggatccatgtcgatggccggcactttctggatgatgtggttggcccggtcgatgccgacgaagagtccgaaccatgccatcgagacgaaatcggcctcttcgttgtaaccgcagctggcgatgatctgatggtgcgggtcgctgatgccgttgggggcgatctcgtcgccgagcatcatcaggtagtgcatgccgcgtccccagaggggctggttgccggttccctgaatcgcacctgcgttgagtatgtcgtatacgcccgtgagggccagctccgcattcgcggcggtggtgtagaggtcgtcgcccgaaacgaacgaataggtcttctcgtcgaggaaactggtgcagcccgccgtcgccgtgcagagcaggagcgcagccgtgtattttagtgctttcgaatagaacgttttcatattcatatcgctgttttagtatttgattgaaactccgaagaatacggaccgtgcgcgcgggtagttggtgtagtccagtccgggaatcaggcggttccagaacgatacttccgggtcatagcccgaatagcccgtgcaggtgaagaggttttcggccgtgacgtagacccgcaggtgggagagtcctattttgcgcgtgatgtgcgtgggcagcgtatagcccaccgtcaggtttttcaggcggaggtaggagccgtcctcgacgtagtagctcgacatttcggtcttgccctcgccgttgagcgacggatacctgttgcccggacgctcctccgtccagcggttgcgccagtagtccgtcgagacgttgttgtagcccacgaaaccctcgtagcggtagcggccgatgttgatgatgtcgttgccgtaggaccactggaacatgaagctgaggtcgaaattcttgaacgtaaagctgttggtcatgccgccgaagtgcttcgggtcgctgttcgcaatgaccgttttgtcgttgttcgggtcgatgacgttgtcgttgcccgcgatgtccttgaacttcatgtcgcccggcttcacggtgattcccgcgaacgacggcacgccctctttcaggttgccctgctcgtcgaagtcggattgctggtaaatgccgtcgaagacgtatccccagcccgaaccgatcgggtgtcccaccatgacgcggcctacttcggtgatgtgtccgccggcgaccttgaccgggatcgagctgacgtcgcccagcgatacgaccttgttgcggttgaggttgaagttcaggctcgtagaccatgtgaagttgcgtttctggatattgaccgtgttgatcgtaagttcgaaacccttgttgtccacctgcccgatgttctgccactgacggtaggagccgatctggctgggaacgtcggcatgcaggagcatgtccttggtctttttgtagtaaacgtcggcctcgatgctcagacggttgcggaacatgctgatgtccagacctccgttgagctggtaggtcgtctcccacttgaggtcgggattcgatatctccgaaggcgacaggcccagctgcacggagttgttgtcgcccgaatagtaggtcttgtcggtacggctcagcgactgataggccggaatgcggtcgttacccgtcacgccgtagctgagccgcagtttcatgtcgctgaaaatcttctgctgcttcatgaactcctccttgccgatgctccatgcgaaggcggccgaggggaagtagccgtacttgttgttcttgccgaatttggacgaaccgtcgcggcggatcgaagccgtgaagatatacttttcggcaagggtgtaattcaggcgcaggaattccgattcggaggtgttgcgttcgcggttggtctgtacgttttcggggaatacggaaccctgaccgatgtcgaacgccccgttgaagctctggttttcgaatccttcggcgcgggtgctgagacgcgtggcggtgtagccgcgcagttcgaatcccagtacggcgttgagatagtgcttgccgcgcgagatggcgtaggtcagcgtgttggaggtctgccacgattcggcgccgctctccgcgacgacggccatgccgttcttggagtacccccacgatgtcgtcgagggataccactcctcggtcttcgaattcaggatcgtgccgccgccgctgatacgcagcgtcaggttcttgaggatcttgtatttgaggtagaggtctccgatcgtacggttctgggtggaagccttgtaggagtcgttgatgaaggtgatggggttggtcagattgtagttttcggggttggacgcttcgtcatcgtcctcgctcaggaagatcggcttgtagaggacgaagctctgcaccagtccgttgtacgagttggcgcccgcattggtgacggctcccttggtcacgatgtgggagaagttgatcgtgccgccgatggtgaaccgcttgctgaggtcgctgtcgaaacggatgcgacccgtgaaacgttccatctggttcttcttgacgatgccctcctgattgaggtagcctgccgaagcggccaccttggtcttcgcgctgccgcctgaagcgacgccgatgttgtagctctggatgatgcccgtgcgcatgacctcctcctgccagttgcggctgcggtagtcggagaagtccctcacccggtcgggcagaccgtcgccgttggtgtcgataccccacgcatcgctggtcgggaacttggcgaaacggtagtccgcgaactcctgtccctgaagcacgtcgatcgtattcgacatccgggccagaccgacgctcatgtcgaaatcgacggaggccttttcgccgcgcccgcttttggtcgtgatgatcacgacgccgttggctccgcgcgatccgtaaatggccgtcgccgacgcatccttgaggacggtgatcgactcgatgtccgacgggttgatgcccgccagcggattgtagcgcacgttggccgaagtgtagctgctcgtggctacttcgtcggcgttgacgtcgatctgcacgtcgtcgatgatatacagcggctgcgttcctgcgttgatcgagttgccgccgcggatcgtaatgtcgatgcccgcaccgggttcgcccgaactggagctgacctgcacgcctgccatgcggccttggagcgcatccataaagctcgtgcccttcgatttggtgatctcggacgtgctcagcacgcccagcgagccggcgacgtttttcttctgggcgtcgccgtagccgatctgcacgacgacgttctcgatctgggtcacatcctgctgcagttcgacccgcagatcggtgttgctgccgaccatgatgttctgcggtgccatgccgataaacgagaaggtcaggacggactggtggtttttgacgcttatggcgaagcggccttgggtgtcggtcgtggttccgctggtggttccctgctcgatcacgctcgcgccggccatcggttcgccggtcgcggcgtccagcacggtgcccgttactcgaagctgggcatagacgctgccgcacgtaaacagggccgataatagtaaaagtagtacacttttcttcatggttatattcgggttggtttttactggatggtatgtcgtgggtccgtagccccggagccgcccgtgtccgggacggctccgggagatgccggacacggaattatctcatttcggcggacgccttgtcgagcggagtgtggcggatgcaccgcaccgagtaggcgttggtgcgctggtagttgttcaggtatacgctggtgccgttgagcatgatgaaacgcgccgcattggtgaagatgttgcctgcgccggcgatgatgggcatgttcgtccagtagacgccgcggcctcccgatacggttcctccgacgacggcctgtcctgcccacggcatcttgagcgggcttcgggcgaatacggcggccagatcggtcaccttgtaggaggtgtcgccgtagaccatcgtttcgagtccggtgacggctttggccatctcgatgaattcgttcaccgtcggtacgcggtagcccggagggcaggggttgttgtcctgcgtggcggcatcgagcggcgccgcatacgtcttgtcctcgaagcggccgccccagagtccgtcccggttcgacgtgtcgtcgcgcgcccagtcgtggggttccttgttggtcggcatgaaaccttcccggcccgactcccggcggtcggcggtgggggtgttcagcggtgcgagggcgttgacgaacgaacctgccgtggccgatgtccatttggtcttttcgtgtccgtcggctttgcgcgaccactggaagagcgatccgaaggccgtgtggtcgttggatgcggcggcgatgccctttgcgccgagattgcggtcgagccatgtctgttccgtatcctgcccgttctcgtccttgacggtgatgttcacggggaaatagatgatcttgtaatagtcgtcggccgaatcgtagttgcggtcctttacgccgatcacggtcacttcgcaccgggcggttttatttccgccgtcggtggtcgagacgcggatggtcgttttgccgtgcgatacgggaaccagcactccgtcgtcgtcgattccggcgacgagcggatcgtcggaggtccacttgagctttttgttcgtggcgttctccggcaggatcgccggggcgaaccggaaggctccgacacccggatcggccgcgaagtcgaatgtcttggacgtggcgtcgagcgtcaggctttcgatgggaatgctgttgtccacgtcgtcgatcgtgagacggatcgcgtcgttgacgtgcatgtcgttggcttcggccgtgagcgtcacttcgccgaaagccagcgccgtgaccagaccgctcttgtcgacggtggccacgttggtattggagctgtaccaagcgattctccggttggtggcgtccgccggttcgatcgtgaccgaaagctggtacgtcttgccggggttgaggtgcagttcccgaacgtcgatgcttactttctcgacatggacgaatgtctcctcgtcgtctttgcagccggagtggacggcagcgacggcggcgatcagaaaagcgtaaagaagttttttcatattttagggtttgtttgttggttgcatgcggcggataaatcgcctgatcctgtaagcaaaattatcaggatgaatattttttggcccccgtgtcgtgaaataaattagcgggaacggtttcgggaacggtttgattggccgggagcgttcccgaaaaagtcccaaaaaggaagaaaaccgccctgaaaaaactttttcaggacggaattgaggctgattctgctattctggggatgcttctcccgcttcgccgaatgtgcgtgccgctattgctgcggccttacgtcggtggattcgcggatgttgatccgtgcatcgagtaccaccgtgcggtccggagcgtcgggattcttgatcttttccagcagcaggttggccgccgtttcgccgatcaggtcgaggggctgggccacggaactcagctgcggttcggtcagcagggccgactgcgactccgagaagcccatcacggcgatctgttccggaatgcggtaaccccgttttttgatcgccttgagcgccccgatggcgagttggtcgttgaaacagaacaccgcgtcgggaatgcggtcgccgtcgagtatcgcgttcatggtctcgaagccgcattcgcgggagatgtccctgcattggacgaaggtatcgggcgcgggggcgatgccgtgtttgctgagcgcctgcttgtaaccttggtggcgtgtggccgagttgaaaatccctttcggtcccatcaggtgcagcggccgggtgcgctttgtcccgttggcgtagagaacgtgctccacggcgaagaacgccatccggaaatcgtcgatgaccactttgctggcttcgacctcgttgctcggacggttgaagaagacgatcgggattccgttgtcgatcagtctccggtaatattcgtcgttgcggcccttttcggtgacggaaaggatgatgccctccaccatgctgttttccagcagatgcagattcttgagctcgatctctgcggattcgcccgactgggtgatcaggacgttgaatccctccttctcgaagaccttctgtatctggatgatgatgcgcgggaaaaacgaattgacgaattcgggtacgacgacgccgatgaccttcgagcgtctgcgtatcaggttctgggcgtacggattaggccggtagttcatcttttcggccatttcgagcaccagccgtttggtctccggcttgacgtcggagtgatcggccaaagcgcgtgaaacagtggatttggatatgcccagagcttgggcgagatcctttatcgtggcatgttttatcatttccagctttttcacgcaaaatagtatttttttttacagtttacaaaaaataaaagattcccgctttccggaagattattcgagcacggcgataaatcccccattctccggcaactgcacgctgaggggttccggcgccggcagtgcgacctcggtcgtctgcagcgaaccgtccgccgcgtcgcgggcgatctgcgcctttcgggccgtcgcggggatcaatccggcgggaatcgtcacctctgcgggagcggtgttcacaccggctatgtaccacgtgccgcccttgcggcgggcgatgacggccagccgcccgatctcgctttgcggcaggacgaccgtttcgtcccataccgtcggcaggcggcggatgatgtcgagcgccgggcggtaacgctcgtcgccggagaggacgaacggattttcggcgatcgtcagcagcggcgagtcgagcagcagcgcgaacgccagctggtgggcggccgtcgtgccgccgggcatggtgaatgcgaccggagtgtagtccgcggcgcccagtacgccgcgcgtgaagggcagggccgcattgtggctggccggaatgttctggttttcgtcgccggggacgtagcggtccggatcgggggtgcggctttcgtcccgcatccgcttttcgtagttggccgtgatgcggttgagttcgatgccacgcacgccctcgcgggtgatttcgttggggtaggtgcggatttcgcccgtcggcttctggcagccgtggagattgaccagcagcctgcgccgcgccgcgtttttgagcaggtgggtgttgaagtcgatctggcgtatgccttcgccgttcatgaagtccaccttgacgccctttatgccgaccgccgcgaccgagtccagaaagccgcgcatctggcggtagtcgtccgccggatcgttgagcttctcccaatggcgccatacgaacagccccacgccgcgggattgggcgtatccggccagctcgtgcaggaatttccatttgtcgggacgctcttcccacccgtcgtcgacggtgctgtactcgatgcccagcgatgctgcggtgtcgatcacccgcttttcgccttcgagggtcatgaagccgccgtcgatgccgctccaccagctccacagcgagcgtccggggacgatccacgacgtgtcggcgaacagttccgggtcgggagccgggttgagactggtgatgatgtcggtatttaccagtgcgtcgaggtcgcgggcgatgatcgtgacgcgccacggggtgacgatgtcgcctgacagctcgaatccctcctgttcggtgaagtcggcccgcaggctggctccgggttccgcgcgcaaacgcatgccgctgtagtcgtacagcgcggcttcggctatcatcacgtattcgtcgggggggcggtagagcagcggcatggtctgcaccggtccctgtcgggagacgatgtgcaggctgtcggccgtcgtggatatccactctccggcataggtgagcagtttccacccggaattccgctcggcgaaccagaccctgctctggtggggcggccgccattgggccgcttccccgttgacggtccgcgtgccgtctcccggcaggacgaaccggtaggcgaagccgtcgtcgtagagacgcgtctggagccggtatttataggccgaaggacggtgcgtcacgtcgaagaggtattcgttgcaccgcccctccgatacggctttgcgtcccgtgacggagtaggtctcgtcgattttccgtgtgcctgccgggcgcagggccgcatcgcggaacagctccgtgtcgtcgatggttatgcccaaggccgaggtgtcgatgaccgtgcggccgtcgtgggttacggtgtagtacaacccctccttgccggcgaatacctctgcccggatgttgcccgaagggcttttttgtgcggtgccgccgcagcctgcggacagaagggccatgaaggcgaaaaatgctgttgttctcacgttgcgttattttttaagttccagagtttcccattcgatgattcggccctgccgggtgagggcttttaccgttatttccgtccgctccccgtcgatgggtgccgtatgttcgaacggatagtcggtgtcttcggtcgttcgtccgtctacggtgaaccagactttccgcaactgcgtgtcgtcttgggtgagatagacgaatacgttgtttgcggcccggccgaaaccgacccgcatgcagcgtacggcgtcgtcctgcgttgcggcgtaaggggtttgccagcgcgtctctgcggtgaagagtgcggcgagctgcggccggaccggggtcggggtttcgatcctgaccgcggcgattccgtttccggcgacgcggaccgtgaaacgtccgtcggcgagctggcccgatgcgccgctgccgcctatgacctgcgtcctgtagtgccctccgtcggaatgtccgctcagggcgtagtccagcgcgacgtccgtttcgacggtttcagcagactggttcatgaaaacgatatacagcgcgtcgtcgtcgacggccgaaatgtagttgagctgccggtcggccggcgtcgccagccccgtcggcatccacaaccgggcttcgcggccgtagattgtgccggggaggtgaccgtagaacttgctttgcaggtaggcgtatccttcgatgaattcacccggaaaatccaccttcccgccgctccggaagagggcctgcgtgacgagaaaatcgtaaagcagcgatatgtgcggcatgatgtggttgtagtggaaggagttggcgcccagttccatgtggccccggagcggatagtccgccttttcgtatacggtcgtgcgggccgtgttgatgtggtagcccggaaaattgcggtagcggcctatgacggcgtggtccgccgtgcgtgccagaaacccgtcgcccgtgtaatgcgccagccgcagcatccacgcagcgtagttggccatgaagataccccggtgtccggtgctcgttccggaggattccggggtgagtccgatttccgaaagccgccatgccgggacccgttcggcgggagcgtccatctgcgcatgtcctttcgacttgaggtattggtagtgcggggctttcccgtcgggattgaccaaaatatcccggtccgggacggcgggggagtaccagacgtactgcgtgtagagtttcgccccgcggcagccggtgtgtcgatgcgccggcggatgtaacggtcggcccccgcgacggcttttttcaggtatccgggctttccggtggcccggtaaaggtgcatggcgtttctccatgtgccgccctgctcgacgacgtccagattgcgcacgcgcgtggagtggtactcttttccggcgaaggagagcaggtaaggcgcattgtccttgaggatgctgttgagcgccgtcagttccgagaccgggcagcaggggccgttcatgcgccgcgaagggtactggatgtcctgcgtcgaatcggcgcagaagagcagcttctcgcgcgaaagcacgtattcgtataccggaagcgccctttcgagaagcatcgtccggttgtcgttcaggacggcgatttccagcggattgagactcgaaacgtttttcaccgcgcccggaacgtccgtcgcataggtgcagcccttttccttgtccagaaaacggctgtaggggccgagtacgtaggagatcatgttttcgatcgtcccgttgagcgaaccgagcgcattgttccggttggctgtgaagccgaacagacgctctgcgacattttggagcgcatccgtggtgtcgccccgctctccgcagagcagggcggaaaagacgagttccccgcccggagccgtttcggaaccgatgccgcccggaaccggggcgaacagcatcggcgaggccaatccctgccggtcgcgcacggcgacgccgaaacggctgttggcggccgtcggcagcggatcgaacgggaattcggcggggtgggccagaatgccgtatgtcgcgttgcggtaggtgacgaacgccgaagggacgggacaccggaacgcgagcgtgaggtaacttttgtcggggaaccgtttctcctgccagatcagcggctgccagatttcgtcggttcgtttcggggctctccccgcaaaaccggtgaatccgaccgaataccagcccccggtcttcgccgtgaggcggtaggtgagcaggggccggcccgtcgcggtgtcggccgtcagctccgccgcgatgctgaaaaggtcgttttcggggtagccgaaagtgaccttgtccgttccttccgcacggtgggagacggggcggacgacgatgatgcgccctgcgttgaagaggtcggctgtccgcgattcgacggagccttcgaggatttcatcgtcgaagccgtcgcccgactgatcggccctgcggtccgtacggttcagttccgggcggtcgctgagccatgtagccacgttgtactgaacgtcggggatgcccgccggacgcattctcagctgcgggtccgcagccgaaaagaggaccgtgaattccggcagatagtcgggcaggaggtgctgcccgccgaacacgaccgtatggtcgggtttcaccctgaattcctgcgcctgcgccgggcggcacgctcccgccgcggccagtatgatcagcagtatgcggccggtcttggtcattgttcgaggtcgaatttcagggtctgtattccgtagcccggcagggtgatgccgaacgctccgtcgccgccgggcgtgattttgcgtccggttgcgggatcgtcggccgaagcggtgccgatgcgcctgccggcgatggccgcggggtgcaccgtcagcgccgtatgctggggccgtggcgtgctgttcatcaggatcaggaatagcctgttccggtccgtcgtcagggccgacagaatttcgatgtcggtgttgtcggcgtcgaacagccctttgaccatgattggattcgcctgctcgtcgtatacggttcccggttcgaatccgaagatgcgctgcggaccgactttcggggtcatgaaaccgcgggggaacgagattcggcggccgctccgcatttcggcttcggcgaagacgtaatcggcgatccaccccagctgccaccacgcatggtgcgggaagggaccgggaccccggtcgaactggctccagtaataggtcgccatgtgcgtgtccggtgcgaggtgcgcttcgcgcgccgtagccgcagcccgcgcgaggtcgaggaagagccggtctgcggtctcttcgtacagtcttacgaacatgccgcagtggctggtgagcaggatcgggccgctcttgaccgccgacccggcgcagccgccgtgctcgaagcagagaccgacctgactgatctgccactcctgcatcttccgccctttgtactcgatttcacggtcgcccggcgtcggatgcgtgtagatcgacgtggcgtacatccgggccgtgcggagcgcggcgtcgcggtatcgggcctctccggtcaggccgtgcatgtcgagcagggcctgtacggcctgtcccgtggcgaagtcgttgataaggcgcgcgtcgccgcagaccccggtgaaagcccccttgtccacggcgttgcgggcgaaccagtcggcgccccgcaccgcggcgtcgaggtatttgcgttcgccgagcagcttataggcgacgacgaagccgtaaaacgtgggccggaggtctttcaggtcggtgaacagcggtttcccgtcgtgtttgccgtaggccacggcaaaaccgccgtcggcctgctgcaacgacagcagccgttcggctccggcccggaaactgctgcgcagcagcgagtcgtccctttcgaagagcaggatgttgcccaagtccatgagcgtatagtacgtgatgccgatcggttcgatatggtcgccccactcttcgacgaatttttgctttttccacaggtaatactgtcccatggccgcgccgtggttgggatcgccggccggggcctgctgcatcagtttgaagttgcgcatgtagggaagccgatcctcggtaagccgcggatcgccggtcatcgaggcgagcatccacgatgcgccgatgtcggaattcttcatggcgtcgtggtcggcttcgacgactccgcccagatagtcctgcgctccgatggtcagcccccttgtaggcggcggtccgccagaaggagagcgagtcgtcgagaatgtagtcccagatcgcttccatgcgcttgtagagcggaagggtcgtatgtttgagcgcgaggaagttgcccagactgtaaatgtcgtaaacggcgtgtttgtgcgcttcgtaccaccccttgtccgtcatgctgacgcggaatccgaaccggacggagtctcccgcctgcttttcggacccctcctgtccgagcaccggatagtagagcgtcggggagagttctccctgccggttcatgtgcgaaaggccgcaccgccacgagatgccgtgcgtgcgcttgccgccggtgtattcggagcgggagtagccgctgtcggggatcagcgccagcgtattgcccgctttttcggtcatggacatgatcatcgtggtgaccgtattgtcgttgcattgaccggcaggtggggcagtccctgtccgtacatgtaggcgaggtggaatacgggctggatgtagtcgccttggaaaaagcccggaacgacgctccagccgagccgctcttcgggaagtatggccagcgtgggcgtgcttaccgaatagtaccccttgcgagccgggtagaacacgctttcgatgcgtatgtccgccgaataatccgggtcgggactccatgtcgtgcgcaggcggcccagttcgttgcgggcttcgaagcagacggtgcgcccctctttccagcctttttcggggtagaagcgcagcgcttcgcccgcgcggttcatcggcacggaagagaccgccctgttggaatccttggcgatgtagtggaaccgcgcgatgtcgaagttcatggtgtcgccgccgcggttggtgatcgtttccggctccgccgagggcttttcgctgctgaagagtatcgtatacgctccgtcgggcactccccagcagcagcctttgcggtcggcgatacgtgagattttccatccttccgcggtctgctcccagcggatttccagccctttgtttctgacggccagttcgtcggagggcgtgcaggcggccgacagtagcaggacgaatgcggagaatattttgaagtgcggtttcatggtttcggtttccggttcgaagttatgcaatttattcggcaatgatccccatcagggccttgtgccttccggactcggagtcttccggccagaagcgtatcgagcgcagcgtgtgcggggcgtccaatgcaatcgtattgcagctctggtggttgccttccgtgcggaacaggaggttcccgtcgccgtcggtaatgcggtagttgcggatgcactggggcatcaccgaatcgaaatgctccatttgcacgttctccagtgcgtggtcgaaatcggtgtcgaagaacagcctgatttgccggacggtccgctcttcgcccaagtcgatgcggaccgacggcgttcggtcgtcgggggccgggatccagccgttgggctgtatgtagggccggaagtagccgttgaggaggttttcggctccgaagcaggtcagcggcgcggagaattcgagcgcgatgtttttcccttcgggacggcgctttgggcaccagaattcgaacgtatcgaccccgatgtcctccggcggagtctgcctgccgaaattggagaccgcgggattgacggtgttgaataccgaagtcaggccggagacgatctccgaactcatcggaatgcttacgtcgggattggccatgaagcagatgaagacgtactgcggcgcgtcgtagcacattccgaaatcgacggtcagtctgttttctccctcccggaggtcgaaaacgagccgcttgtcggtcgtgtccggggtgtagttgcccctgcgcgacgaactgcgcagttcgaccgtcagccgggtcgccttgtccgcttgcacggtgagaccgacggccggaaccgggccgccgaccgggataagctcggcggcggagcagtccagccggaagcgggtgccgtcggggcgcagccgttcgagcgcaaattcgctggatgcgctgatccgggcgttcggggcagcatgccgcggccgaaccgttcgcccggcaggaagtgtccggtgcggagcagtgcggactgcagctggcctatacgctcccggccgataaggtcggccggtttgaggtggtcgcgcagggcgattgcggccgccgtgccgatcgcctgcccgccgtgtgcggcggtgcacatgacgcgcgtggagccgttggccacgtggctgacgctgatgatgcggcctccgatgaagaggttgtccgcatcgggcatcaccagacagcggtagggaatctggtagatgcccttgctgtgccactggttgcaggcgcgccctgcaccgtaaacgccgtcggcggggtgcaggtcgatcgaccagccgccgaacgaaacggcgtcgtagtgctcgtgctgttcgatgatgtcctgttgggtcagcatgtagtagcccttgaaccgccggctttcgcgtttgccggggaaaagcccgacccattcgagcgtgtagttctccatttccgggtacttgcccgaatttttgatgtgattccagacgccgtagacgattttccagagttcgaatttgattttttcggtatcccggatcgtgtccagccgtccgccgtactccagccaccagtatttgcagccgtgctgcgaggtgttgaaatactccggattccggagccgggggatcagctcctcgacctccttcagggcgaattcgggagcttcgaagcgtacggggcgccccgtgtccttgatgtagaacaggatgctgtgccccagcagttcgccgtatcgggtcttgtcgggcgcgaacttctcgccgtattcttcgcggtcctcggcgcccatgcggtattcggctcccgccatgtaggcgagcgcgccgtcgcccgaacagtcggcgaaaagatcgccttcgatcgtgtggtgcgttccggtctgcggattgaacgccgtgaccgatctgacggtgcggccggacatttcggcgtcgtatacgcacgtgttgaggtaaagcgtgatgttcggttcggagagcaccttgtcgatgagcaccatgtcgaacagcacgggattgccttcccggttgcggaaggtgttctcgaccagtatttcgtcgatgacgcccccttcgcgcgaccagcggttgttgttgcccatgtgcgaggtcgctcccagcgcccacaggcggacttcgctcgaagcgttgccgcccagcacgggacggtcctgaatcagcgcgacgtcggcgcccgcacgggccgcggtaatggcgcagcatacgccggtaagcccgccgccgacgatcaccagactgtgacggctgtgtactttcgccggtttgcggcttttttcgaattctccgataaacatatgtttatttgttttttgtcgtgaggaaaatcaggccgcccaataccgtcaggacgatacccgtcgtgaggggaacgagagtctccccgccggacaggagcgcgatcagggagatgaagcagcccgaaatcgccgctccggcgccgatgatgcggatgctgttgttgttatccgtgccggcgtcctcggcggcgggcgccgctgcgttctctgccgcaggcatcggaacgcagacgcgcgagccggagagtttgtgatagatttcatagccggtcagcagcagcgcggggaagagcaccccgaccagcatctcttcggcccggctgagcgagaagccgacggccgcaggcgtgatgaatttgagaacggcgttgacggtcagactggtgacggtcgtgctgaggatcgccctgccgttcaggttcttggagaagagactccagatcagcggcaggtagaggggcactccggtgagtgccgccacgctgatgacgacgttgacgatgccgcccatgttggggatgagcagcgccacggcgatggccagcaccccgaagccgagcgtggagatgcgggcgactttcatcagcgtcgtctctccggcggcggggcggaggcgtttgaagatatcgttggtgaagacgcctgccgagatgttcagcgtggcgttcagcgaacttgcggtcgcgaagatcatgccgccgagcatgagtccgagcatgccggcgggcatcgtctgcttgcacatcagcaggtaggcgttttcgttttcaagccccgaaagtccgggttcgaagacgcggtagatcatcggcggcagcatccacaggatcggactgaaggtatacagcacgccgaacagcacgccgacctttttcgcgtctctgggcgtgcgcacgctcgtatatcgctggacataagcccagtttccgcccagaaagaagaggttgtagagcatgaacgcgacgatgaacacccagttgtattctcccgcgaagagcgtgaagaatccctccggaacccgtgcgaggaactccgggacgccgcccacttcgccgaatgcgagcggaatgacgatgatgaccgcggcgaagaggatgatgaattgcagcacgtcggtcacgaccacggcgcgaaggccgccgagcgagacgtatatcatgcagaacacgccgagtatcaggatgctggacgagagcggaatcccggcggccacttcgatgattttggcgatcggatagaggaaggagccggtggtgaagatcgagatgaaaaggaagatgtaggtgtaaagcttctgcgtcgaggctccgtagcggcgtgtgatgtattccgcggcggtgagacagcccgttttgttccagcgcggggcgataagcaggccgacggcgaatccggctgcggccatcgtgagctgtatggtgacggcgacgaagcccatcgagtaggcgatcgacccccataccacgaacgttccggccgagaagaagcccatgaacagcgacagcccgctgatccaccaagggacgttgccgcctccggcgaaaaaactcttcatgtttttgccggtcgaggagaacagcgaaccgacgaacatgatgcccgccgcaaagacggcgatggttatgtagtccagaatttccatagctcaggttgtagtttacgaacaaaaatagaatttgccggaagatattccgcacgatcggcgaataaaatcttcgggaacgatttcgggaacgattgcgattgccgggagcggttgcggagttgccggatgcggggggcgggcggggtttcggttcgcaggcggagccattgcgccgaaccgaattattgctatctttgcagggcggccggacgtctcaggcggactgcggcggcggatcgcattaataaatatatatggtaagcatcatcgtagccgtcgccgaaaacggcgtgatcggcgataagaacgccttgttgtggcatatttccgaagacctgaaatacttcaagtccgttacgtcgggccatcccgtcgtcatggggcgcaagacctacgagtcgctcggacggccgctgcccaaccggaccaatgtggtcgtcacgcggcaggagatggagattccgggatgcagggtggcccattcgctcgaagaggcggtggcgctgttcccggccgaagaggaggtcttcgtcatcggcggcgcgcagatttatgcgcaggcccttccgctggccggccgcttctacctgacgcgggttttccatgcctacgagggcgatacgcattttcccgcatggaacgacgccgagtggcggctcgtgtcgtccgagtcgttcgcttcgggcgcgaattatccctatccctttgcgttcgagacctacgaacggcggcgaaattaggtatttataccactgcgcggctcggccgtaatccctacctttgcagacgcaaaggtttttttatgcacatgccggacgctttttttcgcactgcgcggcggatgcaggcgactgctggatcggatgcgggaagcggtgtaaatccgctggggcagtccggaccgcatgcggcgattcggtgccggcggaagggcgaacgaacaaagaaaagagaaaaatggcaaaatatttcgacatgctgatggaggacgtgcggatgaaggagggccttcagtcgtgcatgaactgcggcgtctgcacgggcgtctgtccggctgccgagttctacaattacgatccccgtcagatcgtgaacatcgtgcagacacgcgacgacgacgccatcgaggagcttctgaagagcgatacgatctggtactgcggcgagtgcatgtcgtgccgtccgcgctgtccgcgcggcaacacgccgggctatgtgattcaggcgctgcggaccctttcgcagaagctggggttcttcgtcgagagcgaaaagggccgtcagcagctggcgctcaagcgtatcatcggcgagaacatcctccgcacgggttactgcatcgtaccgcggctcgtcaaaccggaactgcaccccgaacagggaaccgtgtggcagtggatttacgataacgacaaggagatttacggtcagttcacgccggtctacatgcgtcacggcgcgggtgcgctgcgccgtctggacgagaagtcgctcgacgagattcaccggattttcgaggtcagcggcggcaaggagatgttcgacgccatcgaggagcactccgaccgcaaggcccgcgaattgggttacgaagagggagccgatcagaagtacatgatggacgtcttcctcaataacagcaacgaacactattagcagatgataaaacgaaagagttggcaggattaccagaaggagattgccgacgaccactactattacgcccgcagctgtatccgccagaatttctttcccggcagcgagaagctgttcatcgacatgctgcgcaacgatctgggcaaggacctgacggacgatccgttgcactcgtcctgcacgggcatcggctaccactcggacatcgtgccgctcgaaacgatcatgacggtcgtggcgcggcagttcgcgctgatgaccgaagccgggtatgaaaacctcgtttcgtcgtgcatcacttcgttcggcgtctacacggagattctggccacatggcacgagttcccggagaccgaggcgaagacccgcgagaacctttacaaggccacggggcgcgaattcaaaaagcctgcgagtctggcccacacgtcggacgtcgtcttccacttccgcgagcagatcgccgcacgggccaaacaccggctggtcaatgcccagacgggcgaaccgctgaaggtcgtggagcatatcggctgccactatgccaaaatattccccaaatcgggtatcggcggatcggaatttccctacgtgctggccggcatggtcgagtcgtggggcggcgagtgcgtggactatcccgaacggcggcattgctgcggcttcgggttccgcaactatctggtgcaggccaaccgcggctattcgatcgccaattcgcacaagaaactggagagcatggccccttacaagcccgatttcatcgtggccaactgtccggggtgcgcgatgttcctcgacaagtggcagtacacgatcgccgagatggaggggacgacttacggccagaacggccacgggattcccgtcctgacttacgaggagatggccggtctggtgctcggttacgatccttgggcgctgggcatgcagatgcatcaggtcgacgtcgaacccctgctggacaagatgggcgtcgagtacgaccccgcggccaaatacctcggccgcaacggaaaatatatcggtaaacctgcgtcggcggtggtgaactgctgcccgacggacacaatatacgacatcagagagtaatgaaacgagtggcagtcataggcggcggcgttgcgggcatgcaaacggccctgcgtctggcagaacagggcatcgaacctgtaatcatcgaaaaggaggccgaactgggcggcaaactccggggctggcacgtgctgttcccgtcgtttaccccggcgtcggagattctcaccgaactgcgccgccgcgtcgcggagcgcggtatcgaggtgctgacgcagaccgaagccgccgggtttacccgcgagggcgtgcggctgaccgacgggcgtacgatcgcgtgcgactcggtcgtgatgtgttcgggattcacgctgttcgacgcgtcgatcaaggaggagtacggctacggcatctacgacaacgtctttacgacggtggacatcgagcggatgctcaacgaaggccgtgtggccaaggccgacggctcgcgtcccaagcgcatcgctttcctgcactgcgtaggttcgcgcgacgaaaaggtctgccagcagcactgttccaaggtgtgctgcattacgggcgtgaagcaggcgatggagatgaaacagctgtttcccgacgccgacgtcttcaatttctacatggacatccgcatgttcggccccggatacgaagagatgtaccgtgaggcgcagcagaaatacaacatccactttatccggggacgtatttcggaagccagcccgacgattgacggccgcgtgcagatcaaggccgaggatacgctgacgggacgtccgctgcgcatgagcgtcgacatgctgattctgattgtcggcatgcgggccaacgacgacaacgccgtgctggccgaaggcgcgggtctgcaccgtgcgccgagcggtttcatggcgccgcgcgacatgttcttgggcaacgtgaagagcaacgtggagggcattttttacgccggaaccgtcacggcgccgaagaatatcggcgaatcgttgaacgaagcaacggccgctgccgacgccgcggcccgatatctgggggcatagcgtatggcggcgatcaatttcggatataccatctccaagccgcgggcgatcgacatcgaccgcaacaacctgcgcaagagcgacgagatcctgcacgaaatgccggagctgcaggcctgcatcggatgcggggcctgcacggcggtctgcacggccggaaacctcacggagttcaatttccgcaaggtccacacgctcgtccgccggggcgaatatcagggggcttacgaggagatgaacaagtgcatgctctgcggcaaatgccggctggtgtgtccgcgcggtatcaacacgcgcggcgtggtcatgcttatcaaacgtaaactgggagacttctgacgatgacttttttcgcaccattctgcataccgttcatggtcggcgcggccgtgatgttcgtcgtactgctctggaagtggggttcgtggctctacctgctgccccgcgccgacaagaaacggattctgttcggactgccgacgcgccgtacgctggcggccgtgtgggaggtgatcagcgaatcgctgctgcaccgccgcatcttcaaggtcaatccgctgctgggctacatgcacatgagtctggctttcggctggtttctgctgattgccgtggggtggatcgagaccatcgcctacctcggattccgttatgtgccgctgcagggacacgtctttttcaaatatttcgccacggggctggaacataagcccgtgttcgacttcctgatggacctgctgctgctcttcgtcctttcgggcgtggcgctggcttggggcaagcgcgtttactcgcgggcgatgggcatgcggcgtacgaccaagcacttgctgggcgaccgcgtggccctctcggcgttgtggttcgtcttcccggtgcgcctgatcgccgagagcacgacctgcgccctttacggcggcggaggattcctgacgggggcggtcggcgcgtggatggcggagcacgtcagcacgctcgcgctgatgaatctcgaaagcgcggcatggtgggcctattccgcatgcctcggtattttcttcgtggcgttgcctttctcgcggtatatgcatatctttaccgagattcccctgattttcctgcggcattacgaactccgctcgaccgaaaaggagggttcgttcgatcattttcaggtcgaagcatgttcgcgctgcggtatctgcatcgatccctgtcagttgcagagcgtgctgggaatcaatgacgtgcagtcggtctatttcctgcgcgaccgccgttaccggatgctgcggctggcgacggccgacaactgcctgatgtgcgggcgctgcgccgaaaagtgtcctgtggacatagacctgaatacgctgcggctcaactcgcgcgatacgatgcgcaacgtgcccgacgagaagcgctacgactatttcaaagggttggaccgctcttcgggagagggcaaggtgggctatttcgcggggtgcatgaccctgcttacgccccgtacgatgtcggcgatggacaaggtgttccgcgccgcgggcgaagaggtatggtgggccgaccgcgaaggcggcgtctgctgcggccggccgctgaagctggccggcgagaccgattcggcgcgcaggatgatgcgctacaataccgatctgttccgcaaacacggcatcacgacgctcgtgacctcgtgtccgatctgcctgaaggttttccgcgaggactacgaactggccggaatcgaggtgctgcaccattcggaatatatcctgcgtctgatccgggccggacggctggatgtcgtgcacggcccgacgcgcttcacctaccacgatccctgcgaattggggcgcggaagcggcatttacgacgagccgcgcgccgtgatcgaagcggtgggcgaactgctcgaacccgcgcagacgcgcgaaaacgctccctgctgcggctcctcggtcgccaatacggccatttccgacagccagcaggtgcgccttgcgcaggcggtggccgaagagctggaagccacgggcgcagaagtgatcgtgacggcctgtccgctctgcaagaaggccatcggccgcggcacgaggggcgaggtgcgcgacttggcggagatcgtcgccgccgggctgaaataagactgagttaggttagtgagtataagatgaaagcaaagaaaacgattttggataccatcggttctacgccgatggttcggatcaatgcgctgtcgcccaatccgaaagtgaagatattcgccaaactcgaagggttcaatccgacgggcagcatcaaggaccgcattgcggtcaagatgatcgaaaccgccgagcgcgaaggccgcctgaccaaagggaagacgatcatcgaacctacgtcgggaaataccggcatcggattggctattgtcggcatcgtcaaaggctatcccgtggagatcgtgatgagcgaggccgtgtcgatcgaacgccgtaagatcatccgcgcatacggcggcacggtgcgtctgacgcctgccgccgaagggacggacggcgcgatccgtctggcccgcaaactcgtcgcggagaatcccgacaaatattttatgcccgaccagttcgcgaatgccgccaattacttggcgcattatgaaaacacggcgctggagatctggcagcagacgggcggacagatcgactatcttgtctgcgcgatcggaacgtcggggactctgatggggctgtcgcgctttctgaaagtgatgaatcccgcgatcaaggtggtttgcgcccagccgaccaaggggcactatattcagggtctcaaaaatatggaggaggcgatcgtgcccgatatttacgacccctcgaagatcgacgtgcaggaattggtcgagagcgaggaggcgatcgacatggcccgcaggatcatctctgccgagggtatcttcgccgggatgagcagcggcgccgccatgctggccgccgtacgcaccgcggcgcgtatcgagtcggggaatatcgtcgtcgtatttcccgaccgtgccgaaaagtacctcagcacgacgatgttccgggagttcgaggattgaggcccggcaagcgcgggcttggggccggtagattcggattccgggagctgttggagaacttccgggttgtgctggatgctgagaaacgaaaaaaaaataattgttggcggctgataaatagcatgatagatcgtaaatgccgcattgtgcccggaaaaatttgtagaatccgaatttttgtcttatctttgcacacgcaaaagcgatagtacatcactaaagacatatcgcgggatggagcagttggcagctcgtcgggctcataacccgaaggtcggaggttcgagtcctcctcccgctaccaaaggggctaaacagcaatgtttggcccctaattttatgctctgcaaagtagttaagtgtcttataatcagtgaataagtaaaattgctatattttaagatattttagtaattaaccaaaatcggggcattttaggggttctttggaataccgggcaaaatctgaaaatctcggtattccagacttgtaatgaaaagtattccagcaggttataaaacaatctgctgactatgattgaaatattacgaatcacttactatctctatgaatttaagcgtacaaagcaaggagaggtacctatctattgcaagctgactactgacgggattaaccgtcagcaattctctacccggttgtatatcagacctgaaatttgggacaaagacgctcaatgtgtccgtggaacctcggaagatgccgtattgattaaccgtcggttacaggacatcaccgtcgagctgaaaagcatcgagcgtaaattatacgaagcagatggaaatgtttcactcgatgaaatttattctctttataagaataagactgccaatgagcatacattgtgtggaattttccgggaacgtataaagcggatggaatctctcgtaggcaaagaatattcaccttctacgttgcaaaaattccgagaggtattcgcccacgtggagcgatatatccagaatttatgtgcgcccgtacaagctgcttagtaaatatcccactggcaagggattaggtaagtgttctttgaaaaacctatcatcacccgacttatccgaaagggaaaccggacggggagtgtagcatgtcgggaacgtcgtaagtcagtcagttaccagactgccactgaacggcaaggtgaaacgatggatatgaggatgaaaaccgaattgtttgaacgacagtccgagctgctctacttgaaggctatgacgtaaggtaactgaaatcgtcatactgcggtactgctccggtgtataggtacggacgcaagcaagaacttgccgcagagcaaccatgataaatggtaaaggacggaaatcgcatccgacaatccatcatgccaacagttactaagtaagtaaacggggattacctaaaccggaacgccgtaaggctatgaggtgcagacctctgaatatccggcacggtaacggagcctccgtagtagtccgggcagggtaacgccctgcacatggcgaagggaggcagctaattttctttaatacaatttaatggataatgtgagagacattatgagaagtccggaaagagtattaaacagtctgaacgaacacagtaaggattcgagctacaagttcgaacgcctttaccggattctgttcaacgaagagttgttctatgttgcctaccaaaagatcgcatcgaacggaggcagtacgaccaaaggctccgacggtcgcagtatcgacgagatgagccttgcccggatcgaaacgctgatagcctcgttgaaagacgaaagttatcagcctcacccgtcgcggagggtgcatatcccgaagaaaaacgggaaaacgcgccctctgggaataccggcttttgaagacaagctggtgcaggaggtagtccgcatgattctggaagccatttacgagggacattttgagaccacctcgcacggtttccgacctaaacggagctgtcacacagcattacttcatattcaaaagacgttcagcggggcgaaatggtttatcgagggcgacatcaaagggttcttcgacaacattgaccatgatgtacttgtcggaatcctgcgggagcgcatttcagatgaccgttttatccgtctgatacggaaattcctgaaagcgggatacgtcgaggattggacgtttcacaacacttacagcggaatgccgcagggaggtatcgtcagcccgattctggcgaatatatacctcgataaattagacaagtacgtgaaagagtatatccgacatttcgacatgggaaccaaacgcaggccgggcaaagagagcaacgatttggccaatgaacgaaaacggactgtgcggaaactgaaaaaggtaaaagacgggactgagaaggcggctttggtcgcaagactcaaagccatcgaacaggaacgtgcagcatttccaagcggagatgaaatggacggaagttaccgcaggctcaaatacatccgttacgccgacgattttattctgggtgtaatcggcagcaaagaggatgcactgcggataaaggaggatattaaatcattcctatccgaaagcctcgccctcgaactgtccgaagaaaagacgctgataacccatacgggtaaatcggcgaaatttctcggatatgagattacggtaacacggaacaatcatcaacgacgggatgtgcaaggacgtctgcgacgcacctacggcaagcgtgtccggctgaatgtcagcatggcaacgctgcgggacaaacttctggaatacggagctatggaaatcaagctccgcaacgggaaagagatttggaaacccaaatgccgttcaggattgatattcaacgacgatcttgaaatcctcgaccgatacaatcgggaaacagtgggattttgcaactattacctgatcgccaacaactgcgtcgtactgcacaacttcagatatatcatggagtacagcatgtataaaacatttgcgggcaaatataggagcacggtacgaaaaatcaacaaaaagtaccgtctcaacaaactgttcaccgtaaagtacgagcagaaaggggtaatcaagtcccgaaccttttacaagacaagtttcaaacgccggacaacggcgttcaacggaagctgcgacatcgaaccgtactctattgcagacgtgagccgaaccaatttgacggacaggctcaaagcggaaaaatgcgaattgtgtggggcaacgggcaagctgattatgcaccatgtccgcaacctcaaagacctgaaagggaaagagagttggaaacggctcatgtcagcccgaaaacgcaagaccattgcgttgtgtccgagttgccacaggctgcggcatctgggaaaagtttagactgaaaaaaaattagtggagagccggatacgccgagaggtgtaagtccggttcgggggcgagttcttggaaacctgccgtagaaatacggtaaggcgccgggtgcttagcctacataagagtacggacattccgatacgccgtgtggattattttttcgtaaagcagttcgaggacaccctattatctcaaggactgaaagcgattactataaataaaatcatgcagcggctgcgtcagatggtcgtatatgcgttcaagtgtaactatatccaacaagacccatttgttgaatatagacctttaaaagagcgaaaacggctggtattccttatgcaggaagaattgaaattgttggaagattatcattttgcccaacaacggttggaagaggtgaagaatatctatcttttctccgtctatactggattggcttatcatgaagcgcaagccctgcaaccgaaacatattgtcaagggtttcgatgggcgaaactggattaatctggtacgtcagaaaacagaccgggagattgctgttccactgcttcctcaggccgaaaaattaataatttggtttgaaaagttttgcaaggtaaatgagtatgtgcaaccgcgcatctctaatcaaaaggtcaattcctatttacgggaaatagcggaggttgtgggtatcgacaaaaaactgacccaccatacagcccgtaaaacctttgcaacgacgattttgctctataacgatgtgcctattgaagttgtgagcaaattacttggtcactccgatatttcagttacccagcgctcctatgcgcaggttctaaataagaatatcagcaatcatatcgggcggttggaaaaggtgcttgatgtgtaataaaagtgctgataaccagcaaaatagttgctgaattatttggaaatctcgaatatttttcgtatattgttaatacagttaaagacttatagtcaggtctttacattgcccgatgcaatcggaagcaagcttagttaggggatagcccgtgtgtatgcatgggcttccctcgtttaacaccccatatgaggagtatggggataatacatattgatatggtaacaaaaagagttttccaatcattgtctgccataacgcttgggcgtcataaaatgaatgacccgcgttatgaatttctgaccgaagagaaaaacggagaggtagtcagttgtatcgtcaataatgcggagataaaggatgtacccggaatcgattatgagttgagcataaatccggataatccggacaagatagatgcactccaaattattatcaatgatgaaagcaagaagttaggggatgttttcatgcagttgccctacggagtaattaagaagaacgttcccggcatcggtgctacaacgctggcgctgcgttcgccgaacaactgtatcgttgtgtgtcccaccaaagctttggcatatgagaaatatctgacgggcatagaccctcaaacggggagaaattcatatttatatgtgggcggcggatttggggatattaaacaatccccttcctcgaaagctatcaataagtatttatcaaataagacgatacgctataaaaagattttggtcgtagcagacagtcttcggaaagtaatggagaaaatcgagccgaggcttcgggattggtatataatggtggatgagattgattcttatcaatcggatagtacttatcggaatcgtgctttgggctgggtaatggactatttcttcaaatttccggaacgccaacgctgtctggtatctgcgacaatgcgcccgttttccaatccggagatattgaaaatgcccgttatcgaagtgaatttcaggcgattgattaagcgcgaggtgaagctgttatatacaaacgacgtccatttgacaacggcccaaacgataatccgcttgcgtgacatgtacggagcagggcataaaattgcggtcgcatataacaggatatcggctattcgggctgtcatcaatctgctgccggaagaattaaggacggaatgcgcaatcttgtgcagtgcgcaaagccaaagtgaagcaggagcttattatgcgaatttagaggggacgtgtcttcccaagccaattacatttataacgtgtacctacttcgttggagttgatattgacgagcgatttcacctattatccgtgtcagatatcaagcagatatatacgattctttcaccggaaaaaatgttgcagattgcaggccgatgcaggcatccccaaggtctatatgatgaaacgattatctacaactcctcttcaaaattgaatgaacgctatactgtatacaataaaaataagctgttgtgtttggctgatgaactatgtaatatgtataatgcgactgttaaaatatatgaaaattttaatggcgtattgacgtacagtttcttgagttcaatgcagtcgttgattcgtcaatccaagcaaacattctacggaagtacgcctgtcagtctgattcggaagagtattcatggaaattatgtgatatcctacttcaatatcgatgctcttgttgaattcgtacgattgcgagaagcgatttacctgataccagacggtttggttgaagcattgggaaaaacatgccgtatcgttgactggaaaaaaatgtggcatgaaaacggtgaggctactcaaaaagttgttgcggcaacaaataaggatttaaaagagctgcagtaccagagtgtcgatgaggttgttgaggcaatcagggagatgcatgaacagagaacagactgtatcccggtttctatggagaatctcaagcgtaaatgcaatcgaactcaacgcggatttgtcgagcgttatgagaaattatcgcagtatgtcccatttgaaaatctggtacaaaggctttcggatatgagggacaaaagcaacgcttggtacaaatggtatcacaatgcggttatcttcaatgcactggcagagaatcacccattcaaacaagttatcaaagcgagctttaagccagaaacaaagtggtgctctttagatattcaggagcatttaaatgtcattttcgaacaaatggggatgaaacctattaaagaggagcgtgaagctgtgaaatggctaaaatgcctgtgtaccttgcagcgaaataaagatgccgtcaagggcaactattatatagttaaaaattactgttccgaaaaatacctgaattgtgagattgcacaaacaatttcgatggcaactccgattaacgaagaattcaaactctagtactcacttatatcaatatattcatatataaatattgattggaataagaaatattcacaattattcccaatgcgcatcgtagcataaagcattcatttacatatctttacacatcggtttgagtgctattcagcccatcgacaaaccgttcaaacagaggattttgatgaatatctgtcgtaaaatccttgaatcaattctctaaaggcatttcatccattttattgattgtcccgtcctgaaaaaggtttacagtgattgataattaaagataaacattttggttcaaaaaatattgtcctgatataagtttacatatgccttccgaacaaccgtctttcggccccaatgatgtttgagtttcccggttctaagttccgcttccaagggcgtaagccaatcgcagctggcatgaggtctgagtgaattgtaaaggataacgatctggtcgatgcgttcttttgctgcctgaaaactttcaaaacattcctcgtcgatccattcgctcttcagaataccgttcacccgttcggcaacggcattctcatacggatcgcccttttcagtcatgctgatgcgaatcccattatcggtcagcaatttcacatattctttcgaacaatattggcatcctctgtccgaatgatggattaacccttgccgtttttgctgcggagtctggtctatggccatcctcagtgcacggagcgctccgtcccgttccaatgtcgtattcagatcatagcctacgatccgtttggaataggcatccgttatcaaagccagatatgcaaatccttctttcaaagaaatgtacgtaatatctccgacccataaacgatgcggccgctcgaggtcgaaaccccggatcagattcggatatttacgcatccagtgccgcgagcaggtcgtaacgctgtatttcttccgacgtttgaccagaagattgttttccgaaagcagcgtaaataaccgatcccgactgaccggaaatccgtcttgttgcagcaaatgccacagtttacgaccgccgagcctgggcatcagtttccggtagtaacccacccgctccaaaagaagggtgtcggacaaagatccttccctattacgccgtaaatgtttataataggcctgacgggtatagccgaacaacccgcacagaaacgacaggctcattgctgtgtgtctttctttgagacgctggactgtccggctgcggatttttttagcaggtcgataccgtattcttcttggaggatatctcccatgatctcatagccttccagacgtaataaagcctcttccaagcgccgccgaagggctttgttctcggataataattcactggcttcttcactcgtaacgcgggacatgatcggataaggattaggggtactcacaaagctacaactatttttcgctttccaccgctgacccatcttatgaatcgtagacatgggaataccatgttcttcggagagttggcgagccgtcttgactccgctcaaatactcctgtaaaatcagatgacgcaactgacgcgataaataatgacgtgataagtctgaattcgttttttgctgcataagatttactcttttctgtaaacctttttcaggacgggacagattgaaacagttggtctgagttggactgacatggactatgatggactatcatagacttacatggacatatattttggagtatctcctttcgatttaaattgaaatctatattccactataatccatgtcagtcaacggtagtccatttcattttttccaatgtaaatctgcttcctacgaaataaaagctatgtaagtgatcgaaggcagaaccatgattcaacaatgaaaaatcacaagagaatcaaggaatgtttcggcgatttcgaaaatattaaattaaccataaatcagaacatgaacgaatacacattctatcaagatcataaaggtacgatctggcagcggagccatttctcagtgaatgccgagtctctaaatgaagcaaagcagatcatagcagccaacaacctgtcttcgaacttcgtcggtgatctggacgacggacaaaccattgttttccacaagtcagagtacctatacgatactttgagcagtatggttcccgatcataaccaaggacatgccacgataatcgttctcgattcgaaccatgagactatctgcatgaacggccacgatccgcaggtggaccgatctgtgcggaaggagctgcgggtcttcgcctggccttacaaactactgccccgcaatgcttccgacgaagagattctcaaggcatgggagaatgggcccataccagccccggaagatgaaagggagatgtccgaagtagaaatatacacgcctgatgagttttctgagaggatcaatgacaataaatgcgctttcgacaattattatgttcgtttcattataataaccttatgaacatgacaaaaatagcaaaactgtgtagcagtaagtctgctcacacggatcatcgttgatgaaacagattccgaagaggagaatctggctaccgccaagcctcaatttatctgcaaaatcaacacggaccttggagataacgttgaatttatcgaagaagataccgaatgtcctttcgatccggaaacagattgaacgcccggaaacctattgaaacgaacgctgatttagatcaaaattataactcagagcatggccgaatcaagccatgctttttaattatccataaccatgaaaacattcgcagatgtaaaacgtaaaatgagacccggcacaaagtggcgttgcatccatcttttcgacaacacagatatgggtgtgcgagcggttggtaaagcacaaaccaatgccgtagcattccttaaacccgacggaaaacttatatggctcttttggcccaaggctaaagacatacaaatcatcgacgagaatacttttatcgtaacagacaacggtagacctatgctgaaatatatcttcgtagagtaataatttcagccataatacgctgtagaaatcttaaaaattaaagcctatgcaaaagaaaagcaaaggccggatattgagtattacacgaatatgtgggtattgcggcaatcccttcgaagcccataacagtacaactcgcttttgttcaagaaaatgttataaccgggactattatctccatcatgcccaaattatgaatctaaaaagggccgagctgtataaaaaaacctacaaacctcgaaatccggcaaaaccgaatcctctacctgcttctggagaaatcactactccagtggacctcatttccatcaaagaagcggcgagacgtatgtgtgtatgcaaacaaacggtgtacaacttaatccatgcgaatcaaatcagggaaattcgttacacctcacgtttatcctatgtaaaatggagtgaaatagtgaatcatttcaatcacaacaatccgaagattccgcaaatcacgttgccgaaaggtaaacagccgttgcgcagggaagtaattgcaaaattcgaaaaggcaacggcaaaagcaaaactcaaggaatcaactccgctgtggctaacgccacagcaagtatgcgaaagatacgatttatcatcaatcaatattgtctacgcttatgccagtaaatttcatatagttaaaaagaaagtccaccggcatacattgtattcaagcaaagcctttgatgccgtattagaaccttatcccgataaaacgatgccatccgggtatataaccataaaagaggcttcactgagatacaatctttctcttacaggagtccgaaagagacttgacattttaggtgttaaatatacatggtttcagaaatcgattatttttcaggaagatgagtttgtgaaaaaatccaagagacttgaaatcgcctgacaattaccgcattacaaaacacaaataattgattgtatggttagtaataaataacttgcaatcccaaaaaaatataacatgagaagagtaaaagttacagttcgcagccgtccgatttccggagatcgacgcacgctctatcttgattattacccggcagtccgcattcccgaaacgatgaaaatgatgcggcaggaaacattgggcatgtacctgtatgataagccgaaaaaccagattcagaaacggcataatgaatccacgcttgcacaagcggaagctatacgctgtctccgcgtccaagctgtcatcaatgaagagtttggttttctggataaacaacgcctgaatacggattttcttgaatatttccgcaaagaaaccctcatgcggaattgtagttgggcaagttgctacaaacacttcaagacattcgtgggcggtaaatgtacttttgcccagatcaatgtcgatttatgcgtgaaattccgggaatatcttctgaaagctccccgctttgatacttccgccaaagcactttccgtcaatacggcttcgggttactaccgcaaattccggggtttgcttgccatcgcattacgcgacaaactgctgcaggaaaatatcaatttgtatctggaccgtatcgatgtaaagcccaacaaaattgaatttctcacccagcaggaattgctcaatctgtcgaaggctccttgtgaaattcccgtactcaaaaaagcgtcgcttttctcatgcctaactggattgcgatatagcgacgtgcagcgcctcgaatggagcaatatcgttccgaatctcgaaggcacggggtataatatccgtacacggacaaagaaaacacaagcggaaatatctctgccgctaagtccggatgccttggagctatgcggagagcgtagtgacggcgtagttttcatcggacttaaccgcaacatgctcaatgctcctctgcgccggtggatctccgaagctggaattacaaaacatatcactttccatagtttccggcacacctacgccgtgcttcagttggcaagcgggaccgatatttacaccgtaagtaaaatgctctcgcataagcatgttacaacgacagaaatctacctcgacctgcttgaagaaaccaagagtaaaaccatcggccgcattcaaatccataaagatcacgatccggatgcagcatgaagaaatagtactaaccaataaaatgtttagaaatggacgaatccactaatttgacattcaacgacctgccgcaggcagtatgaatgatagcgcaagaactgaaagaactccgggaaatggtcgcggtattacagcctccgaaacccacgcgccggccaattcttatcgatgaagcctgcaagattctcggtaaagccaaacctaccgtatatacactgtcccgcttaggtgaaattcccagttgcagacagggccgaaaggtttatttctacgaagatgaactgcttgagtacatcaattccggaaaagttactacagcccgggaaatacgggaaaccgcagagcaggcgctatacaaaggcactcgacgccgataaatgatgaatacggcagagacctcaccatcgaatcaggtggtgaggtttattgttgtcttagaaatctgatttaagttaaagcttaagttaaaagaaagcccaaaacacattgtgcatctttgccgtacaaaacgacaaccaacaagcggtgaaacaatggattcggaacaacagttcaaagagatcagaaccttatgcgttctgatgatagacaagctggataagatttcggctgaatttcgggaaatgtttggcgcacataaacgaaactccgatgatattatactcgattatcaggatgtatgtcagatattgcatatcagtctcaggcatttgcgccgactggcaaattcgaatgaattaccgggcttcaaaatcggcagacggcgtttctggcgtaactacgacgtgcaggaatatattcgcaagatagaaaaaaataagaatcgctaatcatataagttatgcccaaagaaccaaagtataaactcatcgaagaagaaacgcttcgggaactcttatccacacagttccaactcagctattctattatcctgctcagctacatttgccagagaaataaactcgacacgacccttactgcaaacgaagcgggtggcatcataaaattatctccccgccagataaatgacgcccgcaaccgctgcctgatacgggctgtaaactgcgggacatgcaagctatacagcatcttcgaccttgccatgcttgctgcgaacctacaccggaaacggatgatttcaagtttgagacacgtaaccacctattctgctcaaacaccccgggaatccaaataattccctctgctttttctttttaaactcacctttcgaagggacagaccgcttgtgaaagccgtctgtcccgcttttttatattcttatcctaatttaaaaataatgcttaaaaaaccacataaatatgttagcacgattcggaggcccactatatgtcacagacgactatattcctgggatatatactgaaattttcaacatactgatactctctgccagcccctcggaggttcaacgacaattactacagttatgctcccgaaaaggacatcagaacccctataattattttaaatggggattttcggggtcctatttctggctgcagcaacgattatcatactgttcaaaggagtgctttgcattcaaacatctgacgataatgacttattcccggattaataagctctttatcaataattaattctctaagcgaaaatgacttatggtaaaagaacctttatatctgcccggtgataagcaggaactcttcgaccgttatttggataaaacggctcatgccgacctgattgaacgcctccgtgttatcaccggagcccttcaaaacaaacttacaccgcagaaactccgactacaccgtatcgatcgtaccgacgcaataaccttgttccacgagcgacaaaagctcacaaagaaaatgtttcaagcagtagtgacagattttgccgtgcgtgtctgtacgaaccagattgaaatctgcacgcagcaattctatgaagcgcctcgcgggaaagaagccgagcatattgcggcgtcccgaattcccgacttatgtgacgatacggagctattggaacaaatgtacgagtggtggaaaaaccttcttcccggccagaaaaaaggcattgccaaaaccttcgatgatgactttaaccccgaatggtgcttccgggacaaagaagaagaaaccatccaatgtattgatgcctgctggcgcagtttgcccttggaaacgcgcatagatatatatcactattgtgtttgacacacataaaacttaaatccacctttttgaacgtgagacacacgtaaaactgtacaacgagcctatgataaaacccaccgttgtaaacctgccgcagagtttgaatcaagcctccggtataatctttcattttgccgggagccatgcgctcccggttcttttttccagtaaagcatttcaacatttaccttttaattccaatcattatgtctaagaaaatcaatccggcaatcgcagccgcagcagaaaccatcgcaccggaagtagcccttgtagcaactaccgcaatcgcgccttttcaggccatttcgatgaatctcgacatctctctgatcgacccgtcgccgctcaatccccgaacgatcttctccgatgaagggattcaggaactttccgacagcatccaaaagtacggattgcaatcggagattctggtccgccccaagaacgggcgttacgagcttatcttcggagaacgccgtcttcgtgcctcaaagaaggcaggactgacgaccattcgggcaaagtgtgaagatttgtccgacagtgaagcgaagattcgagctttcatcgaaaatctgcagcgcgaaaacctcacccccattgaagagggtgatgcctttgtgcgcctgctggacgaacccgacatgactgtgaagcggctttgcgccgatctgggcaaaagcgaaggttacgtgcgaacacgcattaaccttatgaagctgatcccggaggttgtcgagctgctcaacaacaaagaaatatccctcgaaatcgcaaaggaatttgcgaactacagcaaggatattcagcagaccgtttgcaaggatcatttcaaggaaaacggttatttcagttggcgcggcatctcagccaaagaattctcggaacggttgtattcaagatatatgacccaactcgacaattacagcttcgacaagacagaatgcaacacctgcgagtttaatacccttcagcagaagatgcttttctccttctgctcagactgcggcggatgccagaaaacatcctgcctgcaggcaaagaatgaagcgtatatggtaaagcggagtgtagatctgattaccaacgatccgcgcgtgcatctgatgaaaaccactaccagcaacaaagccgtcgtagaccaactgacggagatgggacacgatatttcggaccttgaaaagtcggtttacaattacgacaacggcccgcgaatgccgcaaaagccggatgccgaggaatcaggggatgccgatgactaccagtgtgcgttggaagagtacgagaaagatctggagaggttcaaggaaagatgtaccgagctggaatacagcgtcacggaaggaaaggttctcaaatatgccgttatcgaagatacggatgttaaaatctactatgagaaagtccgcgcagagacaacgacacaaaacggtgtaaccgttaccaccgtacccgtggtacctgcaaaggacctcaagcagaaagatgaacgaaaccacgagatttgcatcacgcacatcaccaaagaactcaaaaaggtcctccactgcgaaaagaaggatttccccaagacggaaattacaccccgggaacagcaatttttccattacattctcctgagcaaaatttcagataagcaccgggaaatactgggtctgaaaaccgactattcgtccaagacaaccgaacggatgaaatatgccgcaaacctcacagacgaacagaaaacgatgctcatgcgtatgacgatcatgtcttactgcgacgacatgtacgagtacaactgcaaacccgattcggcgaacagcgcgatcatcaccgaattttccaccctgcacttcccggatcaggccaatcctatcattgaccggtacaaaggcattttcgaaaaacgccatgtcaacctggttaagcgcatcgacgctatcgagaaacaagccgagaacatgcgcattcaatcgatgttcgaagccggggccctctggaaaatgccggacggcactattcttaacattctgaccggcgaaatcctcgacgaaaacgtggttttccatgccctgccggatgccgaaatcccggagtatccgatcgaagaacaaccggagggcgacttccccgaaccggacattgaggaaccccagaccgaggatgagcccgaaggagagtatccggatgacccctatgagttcatcccctttgaggacgctgccatgaagacgggcaaaggccagaagtccaaggcaaaatccaaggcgaaaccgaaggccaagacgatgcgtatttctcccaagaaaaccaaactcgcagcctgatatacatcacacacttatcgaaggggacggattaatgtactgcaccccaaaagttggacacttttggggtgttttttatgaaatataattatgagattcgtttaaaggccgtaaaactggtactcgaaggcggactttcggttagggaagccggatgtcacttgggctgtggccgctcgcaagttcacttgtgggtaacattattcgagcgccatggccttgccggccttaagctgcgccacggtagctacagtgcagaatttaagttgtcagttttgaagcatatgcaccaaaatcatctatctttgctggagacagcagtgcatttcggcattccgggcccttttgttattcgtcaatgggagcggctctatcaaaaccaaggtgctgaaggcctgcggcgtaaaccgcaaagaaggaggccggccatgagtaaatcgaagactaaaaaagtcaaactcaaaacgactccgcacgaagagttgcttaaggaactggagtatcttcgtgccgagaatgcttacttaaaaaaattgcaggccttagtcgaggagcgcattgtccgcgagagcgggaaagagcccaagccatcgaaggactaaggccgcagtgccggctttcagtattgctcaaagccgcagggatggcgcgaagcacattttattatcacttcagaaaatcaaaacaacccgataaatatgctcgcgaaaaagagagtattataaggttatatcacgaacataaggggcgttatggttatcggcgcattaccgttgaaatgaataagatcggatatgcgataaatcacaaaaccgtacttaagctgatgaatatttgcgggataaaaagtcaggtcaggctccgtaaatactgttcatacaaaggacagatcggacggatagcgcccaatcttctgcaacgcgactttgcagccgaaaaaccgaatcagaagtgggttactgaccttacggaattttcggtttgcggcgtaaagttatatctatcgccgattatggacttatataaccgggagattattagctataaaatagctgaacgccctaactttatgcagatcatgaagatgctggacgatgcgtttgccagaataccggattctccgggtattgtcttgcattccgaccagggctggcagtatcagatgaagcagtatcagctccgtttaagacagaaaggtattacacagagcatgtcgcgcaagggtaactgtctggataacgctgctatggaaagtttctttggattattgaagtccgaattattatatttgcaaaaattctcatccatagaccatttccgaaaagaattggaagaatatatcgactactacaataacaagcggataaagaaatacttaaacaacatgagcccggtacaataccgaactcatgccatctaaacaaatactaatccgtccaatatttggggtgcacttcataatccgtcccctttttattttttatgtacgggaaacacagacccgccgtacacgggcaatcctaatgaataaacacacaaaccctcgtgcagcgctatttgcacaacgtgtccggggatcactcgaatgctaccggagcctgcatctggtaacatacgattacggctcatcgccgtcattggcctattggatcggaaagcagaaaagggctgccgaaaatctacactttctatccaatggtatacgattgaagtacatcgctgagcttaggcaaaaaacctccattctctaccgtgcgaagtaccggttacaaaggcaactgcagcgagttgccggcagtgtgatggcgtaaatcatccatcagattcactgatcctgacattcaattttgaattaaaatctgaaatcaatatgacaaaaatcggaaagaccatgattacggtcaaaggcgaaatccatccggtagagatacattataaccgggaacgaaaattcttttaccggggtgtgcccgatgaagttatcgcactctcgtcgttcagaaaccgagactatgccagtgagaaagaacttacccaagccctgagcatcgcactggaacagtaccatgagaaaatcaaagtccaacgcaagatgatcctctatactctctttggatcttccgctctgatccgggaacgaatcgaacagggcatgtacggcgggcaaaaagaaggtgtgagttcaaagttcgagactttaatgtatgcacaatatctgttcggatttaatttcgacatattattggaagtaagcgaacaaagagtcgaatattactatatgaaggaagatggcacagccggacgtcgcatgtcacgaccttttaatagccagatgtgcctcattgaatggactccccaacgagagcagtttttccgggatatggcctcccaactacaaaaactcatctgctcggtttctgaattcttcgacaagccggacatgctggaactgattgacaacgagatcgtgcggttattgaagtaataatagccggacccaacctctccggttgggcttgtttccacacccaatacatgatcgaccatgcagactgacattctctcatacgataaatacttggttcagttcagcggcggaaaagacagttccgccgtttttctttacttgctcgaagaaggggtttcgcttaacaaaatcgaactttggcaccaagacatcgacggctgcggggtggctttcttcgactggaaaataacccgcaattactgtcgctgttttgcccatgctttcggagtgcctctctatttgcaatggaaagaaggcggattccaacgggaactcttgcgcaagaatgcacgcacggccccaacctgcttcgaacttacggatggtacggtggcctgcagcggtgggaaacgcggtaatcccggaacccggatgaaattcccgcagctctcaggcagcctcagaacccgatggtgcagcgcctacctgaaaatcgacgtttgcacggccgcaatcgtaaatcaaagccggttcaaggggtgccgcacactggtactctccggggaacggggtgaggaatctccccagcgtgcccgatatgcaatatgggaacgggacccctccgatctgagagaaagcctgaaaaatgctcgccttgtagaccgccaccggcccatccgggattggccggaaaaaaaggtttgggcaatactggagaaataccgcattcgcgtacacccatgctactacatgggctggtcccggtgcagttgcctgttttgcatattcgggaatgccgaccagtatgccagtgctgcgtgcatagaacctttgcgtatgcagcagcttatcgaccttgaacaggtcctcggatgtactgtgaaacgtaacaaaacactcctcgatttatgtaaaaccgggagaccttatgcagccattgatgaacagctccgggtactttcttcgcaggagtattatgacctcccggttatcatgccatcgcgcgagaaatggatattaccggccggggctttcgccaaaaagtaaatcgacgcaaaaaattaatcacatgacaagaacagaatacttacaacgccccttaatcaaagacgttgtttatgaaatcacccctgacaaaatccgggtatcaaacaccaacaccgtgtttgttgaagctcgaaactgccgacggctaaccctgcaggaggtacggcagcattttcgggaactgcagcaagctgccaaaacatctgggaaagtacgtttgaaaggcgttaccagatttatgcctgcgatccgcgacctttatccgaaatactgcgctgcctgcgacaatattgaaggtcgctttaaagagctggccgaactcgtccgtcgtatgcagaaagatggaattcatcaagggtatatatacgatgaacttttcgatgccatcatcgaaaaacggagcgaaatcacacggtgtaaatactgtgacaatgactattattcccaatttctatattatgataagcgagtctgtgatgcacttcaggacaggccgtgggagaatgaagaatttgcagactgcaatatagtcgttgcctaaactgcaaaacatttactcagaacaaaagtataatatcattaaaatccacctccatgaaatccatggaaaataaaactttagaagagttagataacttggaaaacgactacatcgcccggcattgggacacgcgcggtcggcacgaatcggatatggaactcaacgacatcgcccgtgcgaaaattgcggcagtaaaacgagatcatggaatctgctttttagccaaatttaaccccgccaataccgaatctatcttcgtgccctatgatggcagactgatttataacttcgaatacgacatcgccgtacccgtggaagatgaagaactgaggcgtcttttaattttgttgaatgatcggcaagcccagaactattcatccatcatggaacgaatatttaacagggccagcgaaatcggaggtgtagtgcttatgtgggtatagctaaatcatcattctacaaactcatggaaaaacaatcctctgcccggaaacgccgggcatccgctctctgcagccagcaacatcatcctcgggatgatccttcgcaccataatccgaccatgaatcatatacagagaattcaaagtccttttcccgggctatggcccgacgggaagctgagatgtatcgattcagccacaaccagaaagactggtgtcgaaattcgtggtatccttgatattctggtggacctgaacatcacaggactctacacggcattctttcatttccatgcacacgttggagaactcgaaatcattattttccaaggccgctggagtattttcaaaagtcctgtgtggcaagttcagatagattgccgggagtatcctttgattaatattaataccggtcagccgttttatgtcccagctttccttgaaatgcttattctatgggtccagtgacaatttcccgaatagatttaatcgaatcgaagataatcatgcatatatctcatctaactcatgcttaatctcgcagagcgcaagatgcaaatgattggcaaccgttttatgcgatatattcaatctatgagctatctcgtggtaattgagcccatcgcgcctgctcatcagaaaaacattatacctctgccgaggcattttacgaaccagcatgcgaacatgactttcaatttcggaagcaaagtaatatgcctcgatctgtgatattcttggctcaggcttgagatgtgatcggtaattacgctccacggcataccccctgagataatcgaatgcggcattttttccgatatggtatatatatgcccggaatgaatttattgccttcatctgtttccgaagaatccaaatctttatgaagatgtcttgcacgatgtcctctgcagcaacatccgatttaataataaatgcaatatattttttgagtcccggctggtatctcgtaaacaaaattcggaacgcttcgtgatctccggacgataaccggattaatctttctttgtcgtcatcatactccatgtaacacccacaaattagtaatataatcagacaaaaaggcttccattctctgatgtacaaagaatggaagtctttttgcctcttgaatgataaattacatcacctcgtcataagatgtcctaacgtagacttagacgaatatttggggattatttcagtttgagtattttttactcaccgacacaaatcctgatcatttcgtgtatctatattttccagaatgctgtaattgactcccaataaaacaaaaatacatttatttaccggattattgtacccgatgccgattgcataacgtttttattttaaacacaattttgatctgcgttgacttgcttatcatgcgaatcaaccaattcgggaaatatatgctatatcaacggttatcgaagtgtttataaactccgcaaaggtcccatattgcccgaatctcatcacactgtatctcaacctttacggaatctgaattaatatcgtggagacatagacaatctgatgcagagccttcaccgacaatacacaacaaacgaatccgggacgaaataacatagtaaatcctgccgaaaataattgaatctacagtgatttgccgaagaaacaggatcgtgtgttggagatatttctcagacattgtatcgttgccctcaaaatatgctgcgacttgtgccccgtttgctaccatctcggaaatgaccagctctctttcaggtctttttttcattggacagtctatcgaccaaaccgaattataatacggaacacgcattacaccgggaatgccatccacgtcatcgatgccaaacatcagccatggaatcgagtattccggaaacttctgattaattctccgggcgacatcgatgcttatcttgttgttaccccgctttatctgatagagattttccccgcgcaacagaccgatatgttttgctaaataattagttgacatattgacatccttcagcaccgtttcaatccgccgccaacaatcattgttctgttttgccatttatggtgtaattttccgaattttaattccgtacagcagattgctccaatttccggatacaaattaagtagaggattcagataacatataatgcagagcaagctgcttatagctatagtaatagaacggttataagatagctaaaagttttgattattgatacggtcaaaaccgtatgcagacgattaatggtagcatttttgcaggttttaagttatgcgatcctgccataaaaaaagtgagcggggcccttgcaatcagcgaggtacttggaggaaacccgaagcaatgcaagtgaaaatgcccacgcccacatatcgtagcgtagtaatataccacaaccgggcgtgggacacacgacccgtcgggctgcttttcacttcgtcacttctaaaaaaacctccaagttttctctgaacgaaggcgtcgcctattggcgggacgcacttcaaaggtaatactaaaaacttattcagccaatattggacgatttttttgttccgtagtatagttttcgctattcactattcaaccccgtcaacttaggtagtcacgaataaattgaaatctcccgttctgaaatccataccgctacaggacgatttttcgactttttctgcttgtaatctcaatgtaagtaaaattattttttaatacattgaataccagcatggtttaacggctaatgtaaggttgttgcagcttggtgtttcgggatttatctgctaactttgaaatacacgtcggctgataaacctatggaaaagatgtcgctcaaaaaaggaataatctgcatcctcattttgctttgcggattcccattgcatccggccgacggccaacaggcctgccggacgctgaaccctgtgcaggtcgaatcccgcagccggcattaccggcaggcatatctcgaaatggccgatatgctcgacggcaaaattcccttgagcataaaacgtgcggtcttccttgcggagtgggcctaccttgacggcgacctcgattatgatgcctattgctatggtatagatacggccgtcgcgtttttgcaaaggttcattgtggcaaacggactcgaacgctataagaccgggaagaatctggcgctcacggaatacttttttcgtccttattccgggaacgggcataaacccttcacctacgatttcgacgataccgggggccaagccgattttacgaaacagttcgtaaccaaagtcatgcggacgcacagcgggcagtgtcgttccctgccgatgtactacaaggtgttggccgagaccctcggcgccgaagcatatatcgcgtatgcccctgcccatgtgtttatccgctaccggaacgaggataagatgtatcccgaagagtgggtgaacgtggaacttaccacgcaccagattaccccggagttcttttacagggagcatttcgagatcagcgacaaggccatcgagaacaagatctatcttactcctctgacggatcgtgaaaccgttgcggcgcagcttgccgacctcgcgttcggatattggaacaaattcaaatgttacgacgaattcacccgatgctgcacggagaaatcgctggaatactatccgcagcaccccaaagcgtgcattattctgggcaagtctctcgatgcggcccttgtaaaacatctgaaggaaaacgggtataaggaggacgcttgcacccggcagattgaagcgcaatcggccgctctttacgaaaaactgaaagcattaggctgggaagatatgagcgaggaactgcatgacaaactcgaaaaaggcaacgaagaggggatgaaaatgcaggaagcaaccacccaataaactgccgatacaataacccttaaaattatacgattatgaaacctaaacttttgacctcagcgatttgcattatcgcattattttcagtagatttgacatacggctatcatccgatttcaccgtatgcgtattgtatgggaaatcctattcgatttgtcgatcctgatggacaggatgtttgggaaatggattataatggaagggtaaaatggataagccaaagtgaagaacataccatgtatgctctaaacaaggatggtaatagaactggacaatccattacgatccaagacagagctatttttgatggccttacggccacaggagaagcaagcgattatgcggcgagctttacaggaggaaatcctaccgaattagcttcagtctttctttttggcgcagataactcaaatgctgaatggagatttagccggtatgacgaaggcaatggagaccaatatgcgattggaaccgttcataatgatggtttggcaatttcgcccgaacagatggggtttgcacgcgaaaacgagatcgcttttatccattcgcatcccggaaattataaatcggtaacaggtccgtttagtgagcatagcagcatggggtcgctgcccggtgggagaataatacaaccgtccgactcttggaatgtttacaataactccgaccgttatccgggtaacaggaactcattcgtgtattttccgaattccagtaatatatatcatgtacgaggcgtgcaggcacctgcattaatacgaaatgtgagtaaccacaattacaatggtaggaaactattttggggaacacttaatggcagataatctatgaaaaaaatcgttttattattcactgtgttagtactttttgctggatgtaaacacaggaaagctattcgagtggaagatgaaacaccacaaaatagtgaggaatcttttgttttacatcccacaataatggctgctattaaggaatttggattgagtaaccatacggacagaatctatgcagtttattttaccgatacgaatgacggatttaccatgctgaagcaagatacgcttatctacctgtcatttttggaagaaacacccttaattgatgcaaattacaaaggtatattggatatagattccctttcggttgcaatttttgataaaaacagttgtggaaataatttttatgattcgacaaaactttccactatcccgttgagtaacctgaaaaaaatccccgaacacgaaattaaacctgtagccgcatggggagtacaggcggatagtataataagatgggtcgctccataatgacggagtgcaacaaagcgggagaacttagcggtaacttcttttacggctgacaataatttgtcagccttttcctctccctacctccaatatggtcgaatacacttttaaagaacgaacaacagaggattgataaactaattgaatagctacaatccgagattttgttgttccgcaaccggttcaataattccttcgtcaaaaggatctccatagttgaacttctgcctcacgggccatgccgtcatttcttcttcgggatataccgtgagcagatcagtgacggcttccttcgaagcgatcgtcggatcgagccacaaacgctcctgctccgaagtgagtatcttcggcatccggaagggattactgccgccgttgtggatcttacgcatcatggcgttggcatcggtcgtaatcaagacgaacgacagcaccttctctccggtctggggattcgtccattcgtcccaaagcccggcgatcgagaaaatttcctgatcctttaaagtggtatagtagtactgcgcctttccgttcggcagtctgtgcggctcgaaaaatccggttacgggaatgatgcaccggttatgctgccacagcattcgccacggccacttctcaaaaagggtttcggcccttgcgtttttgaacaggttttcccggttataacgttctgcatcctcaggcttcgccattcgtggaatcagcccccattgcattacttggagtttgtcgctcccggaaacaatgacacattgcggctcggcgtaagcgggaatgacgtatatatcctcggccaatcgaatgtcgtagacactaaccttgtgttcggggccggcttcctgcctggccctttcttcctgttcctgctcggcgagtatctgccgggctgcttcgataatatccaactgcttgccgtactttttagctacggctgccgcatttgctgatagagaggtgaagaaacacataaacaaagattctttacaaatttagatggcaatatctatccggtcactccatttggtcgtaggacatttcgaaagcatttcgcgccgcagccgggtgttattctgcccggtcaactccgcgcccagcaccacaagccggctgtcgaggttcagcggaccgttcacctcgtccacggcagcctgcaggcgtcgtaattgctcgatgttgggctcctgatgaaacatgttaagctgcatcgcttcggccggaataaggtccgaaagagttaccgtcgcccgtttgaacaggaacggtctctcaccgagagaataggtcggccagatcgctttgagcagcgtcatggcatacgggatcatctcaaacgtattgtccgtaggtacggggaactcaatctgcagcccccggtaggtctgccgctggtattcgttgaagggatttgtttcgataccgacgtagatgcgccgggcataggaatgctggtcgcggagcttgcgggccgaggagctgaggtaacggaccacggcggcctttacctcgttgaaatcggaagtcattttcccgaatgcccgcgacgtgcatatctcctgcttgtcgggcggcgccagttccagactgatgcagggcgtcccgttcatctcgcgccagaggcgatcgcacacaacggtcatgttcttgcgcacccattcgcgcggcagaacggagaaatcgtaggccgtgcggatgcccatcgccgtcagccgcttttcatgccgccgtccgatgccccacacatcgcctataggcagctttttcagcgcttccacgcgcttttcttccgtgtcgataatgtagagcccccgccgggcatcgtccgtcttggcgagcttgtttgcggctttggccaataccttcgtcggggcgatacccagacagatcgggatgccgattccgcgccgggtggagcgaatgatgtcgcgccccagcttctcgaaatcgaatccttccatccccgtgaaatcgaggaacccttcgtcgatgctataccgctcataattcggggtgtaagatgaaaatatactgtgcatacggttactcaaatccccataaagctcgtagttagaagagaacgtgacgatgccgtgttcccggatggtgtccgttatctgaaacatcgcgtcacccatcttgacgtatttcttcgccagccggttcatggctatcgcacagccgtcattgttcgaggctacgatgataggctttccgtaaagccacggctgaacggattcctcgcaggagcagtagaaagaatttccatcggcaaggccgaccatctgacggggattcaggggcaatagtttctgactcatttcttacctcccttctttacccttaattgccggatggaatgggttacgataccccagagcaggcgttcattgtcttcggtaatttgaattggagcgtaatccttgttgccgggcatcagccagatctccccgttgtcgcgcaattcaacgtatttcatggtgaaaccctcggtagtgacgcatacggcaaggtctccccactggggttcgagcatccggtctacaatcaccgaatcgctgtcctcgatgtcgtcgtcaatcagggagaggccctttacctttccgaagaaggtgctgaccgggttgggaatcagctcttcgttcaggtcgataagcccctcggcggaaacatcgctctccggaaaaaacgaagctcggatcgcccgccgctcgaacagcgcgggttgttccttctgcggcaggcggtcgataaggcgtgtgcgccgtcgcttgaacctccggactttgatgacgaccgtaacgacgcccagcacccgcgcttcggtttcgccgtcgacaggaagcgtgtcgtccgttccgccgccgagaagccatagctcgcgcccctttttgcggatgtatttcagcacgcgctcgccgcagacctcgcagagtgcgaggtccccggtatgcggggcaaggctcgtgtcgaagaggatgccgtcgccctgttcgagttcttcttcgaccatatagtagtcccgaatgcgggcatagtaggtcgcacccggattgagtattaggacttcgttcaggtcgatgcggtcgccgatatagtccgtggccggcgaggggaatcccgccggaattccctcgctgacgtagggcagcgatttggcctttaccgtaacaagtccgtatatatcgaaatgaatattcattagatacagttatggcgcagggaatacaatggcagcacgcaatgctatcgggcattgtgttgtcatttcatcaattatttaagccggccgtataccgacaatgtacatgattggaagttgcgtcctttccgtagtactctcctgcggagtttatgtgcaaaaataacggaaaatttcgtgcctatgttgtgtgaatctaaaagatactacaaggcacacatactttccagcacttttattatgctttgaggtccatttttattatctttggtcgtcaccttgcattcttctatgataaacggaacaaacagaatactgacaatcattatcctgatcattgggataagtactggatgttcgggaaataaaaccgtcgaatcgcagttgtcccgagccgagcaggtgatgcaatcattgccggacagtgcccttcgaatcattgaaaatatcgatacagacgatatttcacgccgtagtacccgtgcccgctatgcactcctgtattcccaggccctcgacaagaattacatcgatcagacaaatgattcactcattcgtatcgccggtaaatactaccgttcacaaggcaatatacgagcccaagttcttacaggttactatcatagcagaattttatgcaataacggagattatacacgggcactgttacttctcctgcgaatagaagataaagctcaggagttgaacgatccttacttgctgggtatgttatatcatcaaatcagcgagatatataccacacgctatgattaccccaataaattgaaattcgcacaacaggcatacgacagctatctcagtgctggtctgaaaaatcattgcgggtatgcacttttcgatattggcgaagcatacttcaacttggaagactatgacaatgctttcgaaaactataaaaaatcactctacatagctattgaagaacaggattcagttatgcagcgttcctgtctcagcaatatcgcaatggcatgcgttgggcaacgtgaacccgaaaatgcgattgcggcgttatggcagattaagcaacaactgcatgaagattgggatgaccaagaatatatctctatggctaatgcttatcttattgccaatcgactggacagtgcgcaatattacctgaacatggccgaaattcggcatgatgacgatcctattgctattgcacgattgaaaagcgcagcagcacgaattcatatcagaacccgcgaattgacgaaagccgcaactgaatttcaatattgtctttctgcccaagattcgctattcagaatagccctgcaggagtcttatgcaagtttgcatcgggattatctcgacaaacggcaacgagttgcccatcgtatgctacttatcatgcggcagcgtatctggcttgcatcggctctgttcatcactataatactctttgtaggattcatcgcttttgtgaactttcgcaaacggcagctaaccgttgcaaaatatatgtcggccatcgaagatataaataatgccaagaaaattttgatggttaaactcgattcgcagcaacaatcggatacgactgaattacggcgtataatcaaagatcggtactctgtaatcgaccaactcgcctctacttattacgagcgtcagggcatggacgagcaaaaagccatttacaataaggtaaagaatttgcttgattcctatgcctctgatgagaaaggaaaacaggaaatcgaacgaatcgtaaacctctgctacgataacgtgatgcaaaaggtccgagaggaattaccgactttgaaagattgggaacgcgatctgctttgctatgtgtacgccggtttttcgctgcgtgtaatcagtgtgttcaccggagacagtatcaactatgtggcagtaaaaaaatcccgtctgaagacaaaaatcgccgaatccgacgctccgtcaaaggattttttcatcagtttgatatagtaaatcactaacaaccagatcattatttgcatttgtgtagatgcttattttgcatccacctaataatcagtgtgttatgaatgcgtaataattagccgcaaatatcggccgcaacaatctgtaatacagtgtgttatacttgtgtcttgtaatggttttacaaggcattttttcgttttgaacggaaggtatctctaattttgctaataattaactcacttatttaaatcccttaattatgaaaacctttactctaatcctcgctgttctgatgctggttccggcgattccttttgccagttctctatgtgaatcggaatactcctgtatgaccgggaaaaaagacaaaaatcatcagcacaccttcgaaattatgattacctctggccggccacgccctacgcgcccccggatgatcgttccgactcccattacctgcatttatgacgcacagtcggaatctctgaacttcgtattttctgaaaatctcggaggagttactattaccatcgcaaatactactacgggaaccgtcatctatgacatgtgttcaaccactcctggaaactgtaaggtcatgttgccggatgaagaaggcgaataccagatactacttgaaggagatcacggagaaatctactccggagtattcgatctgtaaccttcggtaaatatgtaatttgatcattctttatcaacttataaattacatccattttgaaaaaagtattcactttaatcgtcttgtcggttgccctgtactcctgttctcaggatgaaacgctgaacgacacagcagtgtccgaacctgaaaaggcggtggcaggcacgccccccggcgtactttgtttcagctcgacagaagatctgaatttcgccatatcagcaatgaaagagacgaaaaatcttgacattcgacataatcccatgacccgcgcggcagttgccgggcctgtagacggtttcgtttccctgcgagagcatctgatcgatcaggggcttcgggagtttaccgatgcggaacttgcggaaatcattgccgactcccttgaatatgaacccgaagacagcctcatcgtagacccctatatgacagccattctcaacggtgagcgtgaagtacaagttggtaataaaatttgccgtttcgtggatgaaggcatggtaatgtacgatgttgccgataaagaaaaatttaaagttcaggacatagaccttgcgctaaagaaggtcgatgtaaatgcaatggaagaagggcaaacggccaaacttcaaggcgccgacatgaacgcagaattagtgaaaatcgactatatagcaagtcataaaatcgatgatacaaatctccattttattcgggacgacggtaaacttatagaggttggcggttcatcgggcggttcatcgggaggctcatcgggaggttcgtcgggtgggtcatcgggtggctccgattcggaataccgcttgaacgagagtccggatacgagaatttttcttgtcgggggtgtacaaatcccagccaacaaaatcagaagggcaacatataaaaaaggcggtggtaacggcagttggctggctaaaggtgtctccagtgtctttgggacgaatgtgaccataaccaacaattacgataagcgtcatcggatgaaactgcgcatgtatgagcagaactacattatccatcgagctgtaggtatgaccgtccgcatgcaggcaagacgattccggatttggtggagaaagaaagctcaggaattccgttatggctggtctgctatcgaatgtgaatatgacatgaaaactccgacattccagcctccccaaatgccgggtggagtgacaccggagtacagcagaattcctacggccatgaccaagaaattcccgttcgccaattctaaaatcattcttttcaatgtacctattgctaactacgatgtaacaactggaactattaactcggtattcgcaaaaggagtaaatgcgatcgccaagaatatgaaaaagtggttcgatgccccggaaaataagaatacgaaaaaatacccgcgcggaatctttaccgaagtagattccaaaaccataagggtcatttatccacagggagaagaaaaggattggaataccggacgtgaagtggtaaagtgggatgccgaatggttttccggagatttctcagtcggttttgcatacaactcgcccggaggcggattcaaatttggtagtttggatgttaaagctgctaaaaaagttcacatcgtccgaggccagatatatggggctgtaaaatatcgcaatgaatggcgggcttgtgtaatcgcaacggagtagtcagttataaattcgtcaatatgaaaaaactaattcttgcattggcattgctatgcgccttccaaagtaatgcccaaagcaccccgtcagcaaaaagatccgattgtgaagtaagacggttcgaaggcgaaatcggcgtgggaatcaatttcggagccgataaactgaatttcaacagcaataggatcggtgctacattttttgccgaaggacgctataacctacagcggcttccaatagatgtcggactacagattgcaggatcgatttttcatcgagatgcagacaatgccgggaatctggaattccaaacatggaacgtactggctgtaacggactacaatttcagaaggtgtaacaaagtatcattctttgcaggcttcggccttggctataccgctttggacacctccggacctatccgctttgacaattcaaatcccaactgggccggtttttccacgggagacaaaaaaggatcattctgtttcatgccgcgtgtcggtgttgaactgttccaccgtttgcgctttaccttcgactataagttacaggaaaaggcaaaccggcatttcgatcttaccgtaggttttgttttcggcggtggacgaaaataacgctccatttttcagacccacaaatgtatcaagtaactgccgaaaaactttacgagtaggcaaaaatcaactaactcataatgattatgaaatttacaaaacttatcatgctggcctcggtcgtatctttggcctgtgcctgtgaaaaagagatgcccgccgagactgtgcccgcgccggatcaggcgaaagaaacgcgcgtttcgacgcaaatgctatcgttctcttcgatcgaagaaatggggcagcaaatcaacgaactgggagctatggatgaagtggccctgagtgcatggtatgctgcgcacaatttcgaatcccagagcgatgccgtctatcgtgtcgcagcggagatcgaggacgcaaaaactttggctgaagccgaagcaatcaaggccagctatgcgccatatttccttttcaatgaaaatcccgatgatgaggagagtttcaatccctatattcgcaacgaaaatccggattacgcctatgtctgcaacatcaacggcgatgtcgtgatcggcgggcaggtaataaacttcaacacgatcagcgatgtcaaggatacgcatgaataccaacttacgcacgagaccttaaccagaactgtcgaacagagccggaattatctcaagtccaccgtgggtaaacacaaattctgggcagagggacgtttcgagcccaaggacgattttgtaaaagtggaattcacggcacaccggaaagggacgttcggatggaataaaaccaaacaaaattaccatttgagaaacggtcgttcaagctatccgaacacatgggagctttttgaaagcatcggctatgaacttatcaacggatcaaaagatttctggaccggcaccttgaatccgcacagactgaaaaatgtcggccgtatcgctgccggcaaaacggcatccttttccatgatggtttatactgccggaacacttcaagccggtgaaggccgtctcgatctgtatttcacgtctgcacggtaatctactgaattcgcaatatttgctgagttcatgtaaaatcgttcgttttctatgaagagttttttccgactgctatacacaacatgaattattcatcagttgccatcctgacaaacccaaacagattttgcatgaatatcattcgaaccttgagtatgacggtgttaatcaccgtcatactttcctcttgtgaagtggattatgattttgagggtaaagacctcaaaaggcgcgttgtcgtcaacgcgctgatcaccccgcaggaagagtttgccgtccgactgaattggagcggcacatataccgacggcacgaaattcaaagctgtcgcggacgccgaaatccggctgtatgagaacaacgcagaggtcatcaactgcccggctgacagggaaggaataactgcgaccgactttgtacctactgccggccggcattaccggttagtcgtcaccgttccgaattacggggaattgtccgcagaaacagatattccgcaggctccggccggttctcttgtcttcgcccgtcaaaaaggctggtaccggcatttcgatatgacggagttgacggtcccggacgacaccaagtcggtatggattcggggcaagcgcagatacaacggctggaaggatgtctttgaatactatacgacctctgcatttgtcgaccagatcaatggttccaacgacgcttccgaagccaacgacaaaggaagcaccgtgaatttcgagcagtttttacgcatcccctatgaaaactgcgaggcggttgttccgctgcgcttctccgtcttcggagctgaagacgaaaaacatattttccaagtaatcaccgcatcggacacctacgaccgttatatgaaatcgcgctacaaacaggaactcaataccgaatggggcggtgaggaaaatccgttcgtcgagcaaattacggtttacacgaatatcagcaacggcctgggcatcttcgccgggtacaactactacaaaacccttgagatatgaaacggtggattttttgctgcctgtcactcttgcttgtggggacggcccttgctcagacgcccgccgacagcgtatcccgcagcgaagcgatcgattcggtcgttgttacagcccggaaacctttgatgatctacaaacagacgggcaacatcgcagtcaacatcgagcagctcaagtatgctccgctgttcgccggcgagaaggatattttcaaattcctgcagctccttccgggagtctcggccggaaaggacggcatgtcgggtctgctggtgcgcggcggcagtaacgaccagaccctaattctttacgacgacgtgccaatctacaaccaggcgcacgcctacggcattctctcgattttcagcggcgagaccgtccaatccgccgaggtgtcgaaaggctacatatcgcctgcctacggatcgcgtctttcggccctgacgcagatccgcacacgcgacggggaccggcaggaccaccgacagtcgcttaccgtgggaacgctttcgctggccggaaccgtcgatggccccatcgttcgaaacaaaggttcatacctcgtttctgcccgttatttctttcctgaagcagtcttggcgctggtcggcaatgccgtccgtttcgggttctacgacctgaccgggaaactctcttacgatattcaccccggccataccctgagtctgggagtctattccggggacgatcacatgaccaacaaggaggattatgcccggaacgaatacggctggggcaataccacggcgtcgcttcgtctggaatcccgatggagcgacaacctgcggtcctcgatagtcgcttattatacctacctgcagaaccggcaggagtcagaatacgaggacgatgattttaaaaactggggcaaaacgacatataaaacgcatgagttcggggcgcgtctgacattcgatcagcgtctcacacgagcatggtcgctcgattacggagcgaatatatcacaccaacgctttatgccgatgcactcgaaaggttatgtcaacggacagcacaaagagcgcggctattcttccgagcagcttgtttcgggggcgcttttcctgaacaaccggtttcaatggggcggctggcgggcagatgtcggaatccggggcgctatgtatgacaactcggagcaaaccagattcgccgtagaaccgcgggcgcaactcgcgtatgatttcggcaacgacaatgccatatggctttcgggcacgatcaattcgcaggcattggtgcaatacaatcgctactactattccatgccgatcgacttctggacgccttttagggacgggaaattacaacatgcatggcaggtggcgctcggcggccgggcccggctgcgggagaatctgaccctctcgctggagggctattacaagcgcatgcgcaacctgccgctgatctacgacagcgacgatttcctgctggggcgcggcggcttcgtctacggaacaggccgggcatggggacttgagatcatgttgcagcggcagacggagcggctgagcctgacggtatcgtacacttatacgaattcccgacgcagttcggagggcgttagctatcccttcgagtacgacgtaccacatgatttcaacacgttcctcagctacgatgtcctgaaaaggcccggaaggagacatacgttcactttcaatatgtcctggcggtccggccttccgtaccgcctgacgaacgagagctatcccgatactaacggcaatccgatcgtcggcattacggcctatccttcgatgcgcatgcgcaattacttccgttcggacataagctacaacatggagcgccggaaacgcaacggcgtccgtaactggcagttctcgatcatcaactggacatggcacaagaacccggtctgcatctatccataccaagggacctataaggcgactgttttagtgccgatcatgccgtcggtttcctacacccgaacgttcgggaaatagttctcatagccctccaattacggcttatttgtgggcttacacttcataattaatatctttatttcaacctaaacctcaatcctatgaagaaaaatctacttgttttagctattgcggtcctgctgatcggctgctccaaatttgaggaaccaccttctgacactccaataagagagagcaagaccagatcggcactcgcagcccaagacaacccctattctctgactaatgttcaaatggcaatggataaagtatctgtagagatgggacaaccgacaataaaattaaaaccgacacattattacgtccgtttcttgcctaaagattcaacggaatataccagattactggactcctcgaatcttatgcttttcacctatccccttgaccgggaactgacagatgaagaagttgaattctttgaaaacgatactacaaatacttatggctatccttggcattatactaaagtgccgactgactatatatttccggatggcattatccatgaaatactcgatgaagtagttgtcgaaacttttgatgacaatgatattaatgctggcgtgtcaaataaactgactgaggacgtgtgggatcgggtgatgataaaatccatgagattgcccgaccaaactgctcaaacacgctcaagctacaaatggcgtccctatgcaagtgttcggtacgttgatgacttcaatggtcaaactattcctcttgttggggttcgggttcgatgtcatcatcttcttcattttgaggaatgctttacaaacgctaatggtgaggcaacctcgttaggtagcttcaaacaacctgcacgatataagatattctgggaggatcaaaaatattgggatattcgggatggtctcacatggcaggcaaaaacaaaaggtccccgaatgaccggacgttgggagttggtaatctccggagacaccgaagatgcaatgttcgccgcaatacatcgtgcttgccgggctattttccacgacaatccgtttgggattacaagacctaaacgtggtcgaataaaactatgcgccttttataagaaagatgtcggaaaaaatggcgaccatgcaggaattaccgtcggaatatggcctgatattcggatattcagaaaggttaaaggcaatacaagatcccgatgggaaattacatcaactgcgctccatgaactcggacacgcttcacaccatcgggctgtcgttgaattgcctggctctaatcgaattgaagattttgtgctggcggatggaatactcaaggaaagttgggctcggggaatccaatttgcatttatgaattggctatacccaaatcaagtgaacaaaataagacctgactattttgaaaattataccggagtcgttgaaggactgatgaatcagggacttaccctaaaacagatcgaaggaacagtagtgggaaacagactttggcgcggatggcgtcgagatgttaaagcacttcatctcgttgacgatattattgtggatatgatttttgataatccctacatgttctgggcggcagatttcaaaaaccttatcatcggcacatcgcagatttatacggatactgaggtaacttattcattgccccaaagtgataagctgccatccgccatatcaaattccggctggacagtttccggcgaaggatacacaatcatcaaaaaagagaatcggtcgataaaactgcgattcaatactctcggtgaacggaccctaacagcacatctaaaattaattgacggaacagactatgatgtaatcaaaaaaattaatgtaacttcacggggtacaatttacggatcgccaaatccccacacgggagagtggacagtatacaggttaagtaattacaccggaacagttgacaaatgggaatttgaaggactaccttccaaatattattggatcgtatcccaaacatcaaatagtgtcactgttgtatttaagtcatccggcagcgcaacgataaaagcaaaaattcagaatagtgaactggcaacaaagtcaataaaaataccgacagacatgcctatcaattcattttgtgcttacaagaatacagattggccttatgacttttggatagataatgtttccaattatacgcctaatccttcggtgtattataatggatcacggacattagaacccaaaacgtcaaagcagcattttatggcctatggatcacggccttcgtcaagccatcccaactattctcttctgaagccaatatatgaaaacgggtttcatcatggtaaatatgcatacgaccagcgaacctatcccgaattttcacaatatggaataaaggcatgggtattttcatcacagcgccccggtacggttcctctttatttgattgaagacagtcaatataaggataagaaaatggtctacaccatcagttatttaactcaggaaaatcttggcgcatggcgaaaagtttcatcatggtattggaactggctcggaacaagaaaaaaaggagatcgaaattggacggaacgaaagaatttcggcgttatgggatacgtttatccatacattccttaactggacttgttaattatcaaattattatgattatgagaaaaatattgattatatccataaccgcattcaccgctgcattatttatcggttgctctgactcggattattcgtatacttcgaattatatttacaagaacgacagttctcgggatattacaatgaaatcatacaattacgctaatggtgatcttctcgaagatgcaaattatacattcgtaatccctgccggaaaagcccatacactgcgttttgacactgaaggcggattcccgtatccatttatgtggacaagcccgacaggtgcggattatattgtcatttcgaacggagagaaacaatttacaaacacccgacactcatccactggagaagataaattattcagatcagaaacgtatgaaatcttgaaaaacaatgataaaaaacggaatagaacctatcaatatatttttacggatagcgactttgagaatgcaacacacatagaaccttaatgaagcaaaaggggcggaaaatttccgccccttttgctattctcgactaacggtatcaaagctcaccgtcaaatccctttttagtccgaagttgtcgatcacgaaaaatacaacctcggatttctcgtcactgagactctgataaaagagcgtgaagctcaaattatacggatcactgtcgttgaaaccgacgatcgcaggcaattcaacgctctctctgtttacaaggcggtttgcggcagcatccagcacttgtccggccccttgcatctgaatgtacccgaaatggtatttagcgcctttgaaatctccctgccgacgaagcgtgaaacgtatttctacgagttcgtccggttttatatcctccggcagatgccatgtgcccaatgcgaagtcgtaattctgctgtacctcgatatgatcgtcacatgcactcgcaaaaatgagcgatgctaaagctatgaggcaaatacatactaatcttttcattcctcgatcttttaattgatgataaaccgaaatccgattccccaggtagtatggaatgtcccggtagaagagccgaatgtacaatattctcgaaggttcaacagcacaataacccggtttgaaagatagccttcaagagatgccgaaagccgcccgccgtatataatactatcatcgctgcgcaacgtcgctccgtccctgagatgtttatcaccccagttggttgtttcgtaccccgcgacacccgccaatcctgcaaaaagggatatgttgcggccgcgatccgaaatcaaggggtgattataaccggcctccgcggtaaattgtgccatcggcacgagctgatcgcccagcacgccttcgtatcggtaatccttacgaagacaggagaccgcgaaattccaataactgtgattccggttatagcgcgtcagttccaactcgccccagaaccggtatgctccatgagaatcccgaaaagagaaaccatcggcaatgcccccgttgacaccgagagcaacctgtccgggtaatccgcgttgggcatacacttcaccgggattgagcagcaatgcggcccaaagccccaagcataacataatgattgcccgcatagctacctgattttaagttcctcgactgtatgagcatccaccaaatccgtattctgaatcataaacgactggtgacggccgccgttcttttcgaatacatccatgataagcactttatcatccgggatggtgaacttctgaaaaacataaacattacgcagggtctctccggctttcacggctgcgatcgcattatatgcccggaccggctcgacgaatgtttcctgcagtgccgtgcgtttagcgacttttctgtcggcaatacggaaccggatatgatcgatgtcgaaatttacgtttgaactgttgctcagggagacatgaatgtaaaataggtcgttgtgaatgtaaattcccctcaacaacagttgcatgccgaatcgtttgctgccgatgttcttaatcaatcgtgcatcctttttatggatcgtgtacatgattcggtttacggtaagcgggttttcatcgccgagttcctgaagcctgacatacgtctgcgtggatgcgaaatcaccataggggtctttatgcagccagtcttccatctgaatggaaaggcgccccggtacatcggcataaatggcgttgaaggcgtaaaatactccgtccgaggtgatgacgctgaaattcgtttcgccgggaaatccccgcaccgcagattttacccgcaggacattttctgctccatccgctttaccggcaacaaggtccgttgatcccagatcaacgtattttacggctgcggggaaaagaatatgtacggttttggcaaatgtcacctctacctgatagggttcaatcacctgctccggcggtatcacccgggatgattcctgcgctccggccgcccaaaagctgcaaaggaagaggaaggtaattaataacgttttcatggaaaattattctttagaaatgagaatgatctgataacccgctttcacggtaacttttacctgccgcagctttgaagcaatatattgcgttcctcctgtcatggctcctcgaacaagatccattgccacttgctgaccggcattctgagtgaatgaaatactcgttcctaagcccgaaccgattgacgccgcagcttcctttgccgcagttcgctctttcgaatcgggaacatataacccttttccgccgtccaaatcaaaagcgctaagttccacggggatgatattaccagcctgttcgatgctcgacacgacaatctgtaatcgctgtccttcgatagccgccgtaccgaatagaaggcttccggcatcgatctgacaatcgttcactcgtataggctccgtcaatcgcagtcgaattcgatctccgctgctgattgtctggtcttcatccacacacacccgaataccgcgatgattcgcttgggtattgcttcctacggcagtattgaatccgagattacgttcccggcccagttccgacaacaaagaatcgggttctacagtcgccagtgtcgtaacaaccccttcacctaaactgcggaccggatgaactgtaactgttttggaagcactgtttcgtgccggctctgcgcgttgttccccgttattaaagtattttgccgcaagcgcatattgcttttctgcaatttccatcggatcaggaggagtctggggcttcgtctcaaggcgcgattccaactcctcaacctgccgtttcagttcttcgacctgcgggtctgttttcggcgtactgtagaaatcgttcaatagttgtgagacttcccgattcgcttcctgagactgagtaatcgcattctgcggattggatttttgcggtgtgccggatgctccgtcgagcagcgaaaaagagttcgaatcgaaggccgacacacgatcctgctgttgctgttccgagttgacacgttccaatgccttttgtttgctggcttcaatccccggactccggccatcaggaacagtcatgttgaaagaattctcacccggagtttccgccttacttcagccgccgaaaatcaaatacatacaaccaaggaacggcacgagcaaaatcaaagcggccagaacggtctttttccgttgttccttttgcgggtccttctgaatattatcggacgaacccttttttacatcagttttattatctgccattttatttacggtttaattgattgtatatgttccatctgcttctgcggcctctccgtagacagcccatcgataagctgccaaatgtcgagaactgcaaaaatcaccaacatcccaacgattatccacagccgttctcgttgtgtacggcggtctaaaaacgcctttaccttcgccttgctccttcttatccagatgcgaggcatgagcagtattcttttagcggtcataggttccgaggtctttgttttcaatgatgttgaatcgctcgatcaggaacccttgcggattattatctgaacgtgtcgcgtttaccaactggcatgtcgtaacgagacttcgctcagtaacactgctctcacgtaaaatacgttgccgggcataagttttcacctgatacgggtaattcgtgaaatcacagcggatgctgtcaacctcgactttctggatgatatttccggctatcagccgattgaaatagcccttctccattaaatcgcggtagtaactcattgcgcttttatcggccagcaaaagagcttttgtaagattgccttcaatagcgcttttatccggcgagagatcgaagaataacaggtgaaaacgtcggacatgttcccgtgcctcaacaggccggttttgttgtaaatcctgtgagagcgccagcatcaagctccggccttgatccagaacatagattttctgacgctgcgcttcggcaaagctgtaggacctccacacaaccaaaaccgtcaggagcatacagcaacccagaaaaatgattgcatacaaacggatttgccggaaactgctctctatatttttcagtgctttaaattccattttgcttactttatattagggtgtctcattttgaattttcgctcttcctcggcaatccttttaccttgccccttgatgtactttccagcaccagtaatagaacccatagcaaagccaccgagccatttacccccttgagtaacgagattattataactgttgaaacctccggcctgcacaatccatgatgcaacagtaggaacggtaaaataaccacagataccgatcagcagaaataccagataaacagtaccgtccatattgataaaataccagggatcagtactcatcaactccaaatctttttgaagcgatagtgtttgcaggcgggccagaatagcaccgaaaatatcagcaaccggcaaccataaatatacgccgatatactttgtgagccactgtgccaatgaagcctgaaagccatcgaacgatgctatagcaaagaccagagggcccagaatagccagtacaataaggtaaaatgtccggatcgtatcgataaccaacgaagccgcttcgaaaagcgtttccaaaagccatctaaaagccatgacaatgagaccgcgtatcccaaaccaatatctatcctgatgcaactgcgacattgcattcaaatccggtggcatccagcccagttcatcaatttgccggtcaaactcttcatccgagaccaaataagcctgtgtcgggtccttgagcatgatttctttttcgagtttgtctttatccgcctgatattgattcatactgaaagtctggccttgaagaagagagtgcgtggctttaacaatcggggatagtattccgttgagaccgccgataaccaatgtattgaaaaagatgatgcaaatgcacatggcaaaaggtcgtaacaacggaaaaacatcaatgggctcagcacgcgcaatagactgccatacccgataagatatgtatagcaacgcaccgatacatgctattgccgacgccatgacagtcattctttcacataacggaagcatcgaatcgaagagcttacgcagaatttcatgcaggctttcaaaagatactaaagggatcatcataatcatcgtcttttattaccaatacttatcctcatctgtgccgtacagggataatgtccgctccatatcattcgacttcctcgcccttatataggacacagaaagattctgccgggtatagtagctcgttaaattccgtaaccgcagtaattcggcataggttttatcaaccacatccaagcgatctttgtccgtcatcgacaaatccgagggattgatgataccctgcaaatcctttagcgtgttggcacttccctgaagaattcgtgtatatcccgaagcgatagcagcaagttccctcacggaaaagttcttgtcggaaagcatgagctgatagttcgagacatacatatccgaaatttctcccacaaaaagaatacactgctggaccttccgggcgctgcgaacaaggttttttacttttttcagcgtatcatagtatttcttactctggtcataaatcttctgagtctcctgaaaattctgaaccatcgtctgtgccgtagaggatgtctgcaccatctcattcgacgaattgatgatactttgcgttaaaccggcaaggtccgttacaggccactgggcccgggccgcccccgaaataaggacgagggcgaccagcataacactaattttatttttcatgttctgtttccatttttcgtttgaacgctccgtagtcttcaaccagaagcaaatcctgtttgggatcgtaaccaatgccctgattcataaaatcggcatagagattcccttctttatcttccagcagctcagaggataggcatttcttatagttattaatcttgttcccatagcggaattcgatataatacttcccgtcctctatatagattctgaaagaaaccgtagagtctttacgttcccattcaccgcaaagcagctcacgggtcgatgcggtctgcagtaaatattgcccccgcatcgaccgtatcgtctttataagcgactcgaataaatcgagtatttccttagaacgtcccatcgtcttcggttgccgaccgtactgcaaattccatttcgctatccatctcctcacggagcatgtcttcttcactacggaaaataccgtaggctccgcatcgaagcagcccgtctttgccgatcgtaatgtctccgcccggtccctcggaaacaatcaccacacggcgtccctgagcgagggccgtcatctggcgaataatcgtcttgtagcagcgcgtattgtcgcagagcatgagggagaaaccgtcctcgatactgcgaatcagcagcgagcagcccccgtcctgagcgatccaactgccgcaaatcgtgttattacgcacctgtgcgcttaatcgatccacatacgacaggaattgcccctgctccgcatgtcctttccggtaggcagcaagaagttctgcgaatttttccggattattatttttcttatccatagcattgagtttttattgggttatttgtgttgattttattctgcgataactacaccctggcacgagtagtaaattattccctgattccgagagccagacataaatccgccttccgtcttgaaaataatagggccttagccaatgatgcaacctataccaagtatcttttgagtccccgaagacaactatataatggtcatcttcgcgcgaaatagtgagccttccacgcggaagaacagcatctcataccccgcataacgcggcattcttattccgacaatgggatgcagaccaccatgcgagggaagctgcacagattataaacgttcagagacctgtgatagcccaaagccacattttcgtctttcgggataattcggttttctgtaacatgatcgtttgttattctgaattgcgcctcttatctgccaaaatacgaatagctccctcgatgtctccgttcatcttcttggcgaggttgaaaacctcgactttctcaacctcttcggtcgtgtatgtcaagtattcctctgccgagacctccgtagcatagactgcggattgcaccccgcccaaaccgatccacacctctttgtacagccgcgagggatcgttcgaaaggttgatagataggatctgggccttctccttgtccgaaagtcccagcaggctttggatgccgtcgaactttgtcatgtacttacgctgatcgagaagaatcttgcaatctgcattgttgatgatcgagtcttttacaatggaagaagaaataatatcatcgacttcctgcgttacggtaatagcttctccaaaatacttgcggacagtcttatgtaggctaagcacccggcgccttaccgtatttctacggcaggtttccaagaactcgcccccgaaccggacttacacctctcggcgtatccggctctccactaattttttttcagtctaaacttttcccagatgccgcagcctgtggcaactcggacacaacgcaatggtcttgcgttttcgggctgacatgagccgtttccaactctctttccctttcaggtctttgaggttgcggacatggtgcataatcagcttgcccgttgccccacacaattcgcatttttccgctttgagcctgtccgtcaaattggttcggctcacgtctgcaatagagtacggttcgatgtcgcagcttccgttgaacgccgttgtccggcgtttgaaacttgtcttgtaaaaggttcgggacttgattacccctttctgctcgtactttacggtgaacagtttgttgagacggtactttttgttgatttttcgtaccgtgctcctatatttgcccgcaaatgttttatacatgctgtactccatgatatatctgaagttgtgcagtacgacgcagttgttggcgatcaggtaatagttgcaaaatcccactgtttcccgattgtatcggtcgaggatttcaagatcgtcgttgaatatcaatcctgaacggcatttgggtttccaaatctctttcccgttgcggagcttgatttccatagctccgtattccagaagtttgtcccgcagcgttgccatgctgacattcagccggacacgcttgccgtaggtgcgtcgcagacgtccttgcacatcccgtcgttgatgattgttccgtgttaccgtaatctcatatccgagaaatttcgccgatttacccgtatgggttatcagcgtcttttcttcggacagttcgagggcgaggctttcggataggaatgatttaatatcctcctttatccgcagtgcatcctctttgctaccgattacacccagaataaaatcgtcggcgtaacggatgtatttgagcctgcggtaacttccgtccatttcatctccgcttggaaatgctgcacgttcctgttcgatggctttgagtcttgcgaccaaagccgccttctcagtcccgtcttttatctttttcagtttccgcacagtccgttttcgttcattggccaaatcgttgctctctttgcccggcctgcgtttggttcccatgtcgaaatgtcggatatactctttcacgtacttgtctaatttatcgaggtatatattcgccagaatcgggctgacgatacctccctgcggcattccgctgtaagtgttgtgaaacgtccaatcctcgacgtatcccgctttcaggaatttccgtatcagacggataaaacggtcatctgaaatgcgctcccgcaggattccgacaagtacatcatggtcaatgttgtcgaagaaccctttgatgtcgccctcgataaaccatttcgccccgctgaacgtcttttgaatatgaagtaatgctgtgtgacagctccgtttaggtcggaaaccgtgcgaggtggtctcaaaatgtccctcgtaaatggcttccagaatcatgcggactacctcctgcaccagcttgtcttcaaaagccggtattcccagagggcgcgttttcccgtttttcttcgggatatgcaccctccgcgacgggtgaggctgataactttcgtctttcaacgaggctatcagcgtttcgatccgggcaaggctcatctcgtcgatactgcgaccgtcggagcctttggtcgtactgcctccgttcgatgcgatcttttggtaggcaacatagaacaactcttcgttgaacagaatccggtaaaggcgttcgaacttgtagctcgaatccttactgtgttcgttcagactgtttaatactctttccggacttctcataatgtctctcacattatccattaaattgtattaaagaaaattagctgcctcccttcgccatgtgcagggcgttaccctgcccggactactacggaggctccgttaccgtgccggatattcagaggtctgcacctcatagccttacggcgttccggtttaggtaatccccgtttacttacttagtaactgttggcatgatggattgtcggatgcgatttccgtcctttaccatttatcatggttgctctgcggcaagttcttgcttgcgtccgtacctatacaccggagcagtaccgcagtatgacgatttcagttaccttacgtcatagccttcaagtagagcagctcggactgtcgttcaaacaattcggttttcatcctcatatccatcgtttcatcttgccgttcagtggcagtctggtaactgactgacttacgacgttcccgacatgctacactccccgtccggtttccctttcggataagtcgggtgatgataggtttttcaaagaacacttacctaatcccttgccagtgggatatttactaagcagcttgtacgggcgcacagagatatttcagatactccgccataccttccttggcgatagccttccacgcttcctcgatgagaataacctttcgcacgccctgtaaccgtcgcatcttattgatgaaggtttccatgatgatgagcgttacgatcgggaataggattttgtgatccttaatattatctaactcaaagatcacaagacgttttgagagcaaatccaactgtttgtcggagttgagaagatagtcatactcgccacccttgtagtagggttcaagcacattgagaaatccatcgacatcgaaatctttttcccggacatttttctgccgcagaagccgccggtaatcgctgcccacgaattcataaaacgtgttaaacgaaggaatcagttcagaatcctttctcagttcggccagatagagattaacggcattggaaagagctacctcctcggcccgcgtcggcggttcattctcgcgtttccacagagtcagaatcaaggttttgatagactctcgtttctcaatgtcgaaaatcccgtcatccgtataaaacggattgaagcagatcgggttttcgtcggtataggtaaaatagatgccgtccttcccatgcgtcttttgattcacaagttcacacaatcctttgtacgaattaccagtgtcaacaagtacaatatgcgctccctgctcccagtattgacgaactaaatgattggtaataaacgacttgccactccccgaaggcccgacgatacatttatttctgttctggattatacctcgtttcatcggcaaatccgagatgtcgagatgtatgggaattccagtatgccgatcgaccattttgatcccgaagggtgacggactgctgcggtaatttgtctctgcggtgaaaaagcataaagccggctccaaaaaggtataaaatgattcctcagcgggaaaatccgcttcattacccggaatagcgccccagaacaatgccggaacatcaaccgtattgtgatggggcgtgcaacccaaaagtgcgagctgggctccaacgtcattgcggatacgcttgagatcgtcttcattctccgcccaagtcatcacattacaatggcagcgaacggaacgaagattacctacatgagcttccgaaagatacagatcgatccactccttgttcacggcattcgaccgggaatactgcgacaaggaattcatattacgtcccatgcgttcgaagcgttcgagaatctcttcgtggttctccagaaagataaactgattgtaaacgtgatcgcatccgagcaacaacccaacgggtgcggcaaaagaaagacggcaatcactgcgatcggtagaaagccgctcgtaacgggtgtccgttccgacctgctggggcaggtcatccaaatcggtgagcgtatgcatacagaggatcttgtccccgatcatcattcgccccggatcgagctttatatcctcgtttaccgaatgttcgaagttgagcgtgaaatactggttcaggattcccggagtcttttcatccccaagaatctcttcggtcgtaagacgccggattccaatcagaccgctttcacggataatgctctcggcctgacctacggcatccagaaaacggcttatagcttcgggatcacgaatctcctttggaatgataaaaccccggcacaacgtcgtgaaattgctctgctggctgatacgctctttggttgtcttcgtcaggaaaaggtaacaggcatgctcaaggtaaggccgttcattgaaatgccgttcaaaagagcgggagaggaaactttgatcgccatcccgattctccggccgatacttttgcgacagaaaccagtcctgtttatgaacaacggagtaatcgggtaggactttgattgctttcagtcaggtagcatgaatcgcttcgtattctttggtggtcacggaaaacagttccggcagttcaacccgaaatgcgaccgttacatcagcctctttactgacgatgcagccatgttcgacagccatgattggaaacttatcttccaatgtattttttttcaaaatgcttttcataagtgtttgggatattaatccttttcaggcatttgaacctcttatcgacagctaaaggtcccggattccgctcgttctggcgatgagccttacaagggttttccgagaacttatcctccggggaaaccgatgccgcgcagcaagtttcatcagcccgtgagccccatattcggcgttcaaatgaaaagtgaaccagaccagcgcagtacccaataccaatgcaatggtgatacatactacaggaggtgcgcccatcatgtacaagacgacaaaaaggacaaatacgcctaacaatcctccggcgaaaatgaagacatactgcgctctgagtcctttaaattcaacttgtttgccaacgcctttattaatcatgtactcggccatcgttagaggaagaacgattcgagaacgacacccacgattacaaggaaaatgcaggctccaaaccaactggcagccgtttttgaagtgtccgggtctcccgacgagaacttttgatagactttgatgccgccgatcaagccaacgacagcgcctacggcataaattaatttcgttaaaggcgcaaaataactcgtaaccattgaggtggcatccgtgatgcctttaataccattgccctgagccatagctgcgctggcaagaacgacggccatcaaagtcaaaatcagttttttattcattttttatgtctgcgttttaaaattattaaaaaccgcagaccgcgcacttcggaagattggcggcctgcggtcgtcagtcttcgttagtgcgttcaggtcagtcagcctgaatcgaaatagagcattttcatcgcttcgtagtttttgggtttaacaatttaactgtaagcacctgcatcgaaattatcaatgccgtacttctcttcatccgtaggttccagcaggtcccgttgttcatcggcttgtgcaagttccaactgttcggcaacttcccggcgaatttgttcttcatcgatgatctcgataatctcctcctctccgtcaccgccattgacaggaacaaatcgcgccgcagcaaaacctttgtcttcccacctctgcggctgtttcttttctgcagggcggggtgtctgcgttctctgaaaggccggagccctccattccatgatccgcggctcctgctcaaccttcgtcgtggctgcaaatgtatcatccccggcagtttttggttctcttttcgggccgatgtcacccgttggctctttctggcgtgaaacataccgcttcttttcaaccagattatcgtccgtcagcgtagatattacctcctgttcgggagacgccaagggttgttcgggcgaactgcggcaggaaaatcggagtataggaccgaaccattcccgaagcaaagaccgccatccgtcaaagaaaagttgtgcgagttttcctttaaacaggaacttgtctacatagagatatgtagaaaggcttcccaagagtattattaggattgtcttcatgctacaatatgtctttcgtattcttctgacgatgcaatctgttaatctcatcccgaaacaattcaagatgatgggcaaggatattttcggcaaaggatgtgactgaaatcctgctccatcccaaccggcgtactacatctgagagtttctctttagtctttgaactgatgtatattgcactgcgctgctgcacgacatgttcgcagaggaaaagccgctcatagctcgatatagggcgaggtttcgctggttgaggaggtctttgttcagtaacagcccctttcacctcttgctgtacattctcttcggttctgttcgcagagtcggtcttgccggtttgcgccgtgggattattcagcacggagcccgaaggactgcggcgcgacgccacttctcgcaggaggatttcatcaagatcaatctcctccaattttttctttcctgccatgcctattcctcctcgacgattttgcagatttcagcacacagagaatcgagacagcactccgcaacgaaagaccgctcaccggggaaaagcgtcgaacggcatatagcgccgccttcgggccgcaattctttactgaaacgaaggcgctgcgggatgttggtttgcatcatcgggagcccgaatgcggccaaagccttctcgtacagatcgtatagtggcgtgcgttcacggcgatcgatcatcgaccaaaaaagatgcactcctttgatttccgacttctcgctgggaataaaagactccgcaatggtgcgggcaaaagttacactgctctccataatcatcttatcagctttcagcgggatgaaaatccgctccaagccggcaataaggggtagaacccccttggtcgcagtagtgcccgggagatcgaaaaaaacgtaatcgtactcctcatcagtagaatcgaggaaggttttaactgtagtcaaggctgtggcggcccggcattcaagtacaggccaaatcttccgccctgtagctttatactgccgaatcatcatcagtttgtaataatccgagcggtcgaggatttccaactcccggcggcgctgttcaagaatgctccactgggggtagtcgcaatccgcgactacaacacgccggccgagacgataatgaagcattcccgcaagaagaattgtaaaagtagatttcccgacgccgcctttctgactgcagatagagatgaaatgaggtttgtttttcatagctgaattcatatattgattccgttgagtggaatgctgtcattgcactgcatgcaggcaatgaccgccgtgaaccccgatcattcatttcactgaatgcatcgtattcactgaatgcagtgcgtgaactgaattcactgcatgaacggcctgcttccaacgacctcaattcatacagcgacctgcacgcatccacatcatccggcacaaagaaaagcaggaatcgaagccctgattcagtatgtcactcaatgacactcccagtccgcaatcgtctcttgtgcagttgattttttatccctaacattgcacatgagaacgataccgcatccgatgagcggcggcacgctggccgccgccgggaataatccgctgaataagcggattctatcggcgcctgccgatagcgagctgtgtttttgtatgccgcaaatatttgcggcatacaaaaaggcccggactccgaagtcgtccgggctggttttcgctccaaagtcgcataacctataaaaaaattactatggcaaatggaaaatcggggcgtccgaaggccaaagaccccaaaactcacaggtataatttcaagctcaacgatgaacaggaactacatttccggaagatgctcgaagaagccggctaccgggaaaacatctcgaaattcatcctcgcacgtctgttcggatgagagttccgggtctataaaagcgatcctacaggcgcaaaatatgtcgcgcggctgaatgatttctactggcagttctcccgaatagggaacaactataaccagatcgtaaagcaagtgaacacccacttttcggagcaggcgatccccgtgcagctcgacatgctcatcggctacacacgccagctcaaagccctgagcgaaaagatcgcatccctgaccgaagaactgcgcaaacaatggttgcccgaataaaccacggcgcacatatcgaaggggtgcttttctacaacaagttcaagaccgacaaaggcgaagcacgggtcgtcctgtgccacaacctgcccatcgttccccaagacggcaagatcgacatccgccgcctgagcgaagcattccgcccctggatgacgcatccccggcccagactcggggaaccggtctttcatgtctcgttaaaccccaatccaaaagaccggatagacgagatgaaaatgcttgaaatagctcattactacatggagcgcatgggctatggggatcagccctatgtcattttcgaacacaacgacatcgaacgcaagcattaccacatcgtttcgacacggataaaacccgacggcacgacgatcgactctttcgaatacaagaaacgatcgaaggccctgaccgaagaaatagaacgcgaattcaaccttattccgaccgttcagggccagcagtccgcagctttcgaggaactgcgcaaggtcgaatacgcgcagagcaacctcaaagcgcagctatcttccgtactcaacaacctgacggaccgctaccgattcagttctaaaggcgaatttacgaccctgctgaaaatcttcaacatctggatggaggaatgcaagggagaagtcgaaggccgtccctatgccggcattatatacggagccttggatgaacacggccaacgggtaggaaaacccatcaagtcaagccgtattagcaagaaattcggctataaggcactgcaaaaggaatacagcaaaaccaaacgatggatcgccggtaacaaacagaagttggagccgacacggataacaatccgtgaggcgatgaagaccgcccggactactgaggaatttgcagcggcgatacgtccgggtggaatatcagtagtcttccatcgaagcgccgaacatgaaaacagaatctacggcgttacattcatcgaccataggaacggacttgttataaacggctcccggctcgacaaggcttttgcggccaaccgcttccaagaactgtttaccaaggctccggccactgagcctcagaaccgtgcggagcgttcgcagcagagctccgacacgggaaatgactggttcacgcagcaatcgcacgactttggagccatatccgacatattcccggacctggatttattctccgtgctgctcaacgaggcatccagacccgattattgggatgaatgggcgcaggaataccaacgaagaaaaaagaagaaaaaacgccggcacttgaaataatacccgtcaaaacttaaagcaggcttacaaaaaaagctgtcatagacagcttacattttggattctccggtacacgcccggattaggtgatttttttatcccctgttcccagcttttgacggtcaacatgcaaccgtaggccgcaatgcggacagacgatattatcagccttgagtaattgttctaccgataaaggaatataaccactgcatacggggcaactcatgcccattggctctgacggtatcatataataatcactttacaggtttcagttcttggggcagtatatagggaatcatggctattttaaccgaactgacacccgttctcaggatatttataacccatctttcaccgttttttcttttaataacaactttctctcccttttttaccggacattcttgttctgaataatacggttgactggattccggggcctttgtccagccaactatgcctgagaagatcaggttattataaatagagttgaattccatagttatcataacttcccctccccagacagctacagcttcatccgacgttatgtctaattcaagcatattattcttttcttcggattcagaaggcaaattcgaaacacgggggatagatggaactactgtttgcacactgtcgggcttcgaatccttcattttattcacaacaaaacagaacccataaccagccgaaaatataaaactaactgccgtaataatagaccacagagatttaactttaacccggccaagtaatttccataattctttgcaagttatattttccatgtaccttacgacaatcgcatagtcatcgctattctttcccgcgttattttgaatctgggattgtgcctgtgccgcggcttgcgcctgaacttggttattcacgttgatattaacttgaagcggcttgtcgtcccggctatgggcattcttttgctcctgttcctgatccttctgctgctcctcgtccactaatttcaaaaaatggttgcaagcttcgattgtttcctgacgcatgatttcaatgccggaaacaggcagtggaagcgatccttcacgcttagtatagtaatcgatcgtctttttgaaaacagcatctttcgactgaagataattctttaagttcttgacggtatcgataagatgcttcgggcttacaaaatgattgcctatctctaaatcacaaaactcctcccttaaattatgagcaatatcccgtgatgtttggatgatttcactgctgtttataaattctccatacgaacgactaccgtattccttcatactctcgaagtattcacgggaatggttctgcacgaacttttcgaaatatttcctggcttcgtcaaaagtattcataaaacaaaggtagtgaattatctccgaattatcctaatatccagaacctcgaaaaaaacgcaaacacctgcccgtagtagctgcagagactttcgaccgtggaaacggatagaatacccatatcaaccggcacatcagaaaattacttgaagatttgctgttttctgaataataatcgctaactttatatcacggtctgataaatattaggctttatgggtcggtggacctcacagttcatagatgtttcatggaggaggtgattagtggcctcctcccttttttaaacgatgtttgtacacatacacatacccatcatcgactgtagaagtctgtgttcatcctttcagaggttgaagcgtcccgtctttccgattccggaagaaaatgactttatccgcaacttcggcaaagtatccttgaattacatcccagcccttccgtgttacgccggagaagactggtttttccggggtgaaaataccgtgaggtttaaggaactgccccgatttaggattaggattggcaaacaatattacaactgccaaagcaaattccgacgcctcttctgcaacgggaaaatggctaatcgttatgaagtgggcttagaattcacgggaatgagagtatacgccaatcagcttgtagaccatctgttcagcctgggcgtcaaagtcaaaaactgcgaaaaaggatacaccccgaccactcttttggctgtcgggaaattcctgcctgcgatttacgactattcgacatcgaatcagccgctccacgatgatttacgtgtaagctgcggggagacattgtgtattctggaatctgcggccggggaaatcgtattccggcctcagcatgccgaattggtgcttaaatttcctaaacagggactctcactttatcatttcgtctacacacgggcgaataccaagattcattgctggataatacagaaatggctgacggcagacgcccgcttcgccagcaaactgagaaacgcgctatttcaagttcatttggagtcccaatctttgattcaggcatataaatttctgatcctgaacgacgatccccaaaagttaaacaaggaggcattcctgcgtttcgtaacggatattcaggctaaactcaagcgccgatcccgcttcactatcagcaccgaacgtatcgtcaacatcgctctcaaagcaacgcacgccctacaaccggcgcagatgaccaagatgatcgacatggtggataggatcggcgacaaataccagaccgccgactttctggaactcatgtcgcccctaacgatcgccgagtggaaagaagagatcgaacgggagcttcaaaaaaactggagtcccggaaccaaaacgcaactcgaatacctgaaagaggcatgtagttcctcttcgttcaagcaattcattcgctttattgttcaatataagggcgaaatctgggatatagcgaaggacatcattaccgaccgactaaagaaataaggcttacgggggagggccagtagggcgaagcccctacaatatacttcaaaactaaaaatggccggaagaaaaatcttccgaccatgaatggggcaaaccgctccgttttaaacggtttccatcatagtgaattgctgcatctttaattgcgtatctcaagtttacaaccagcatttacatgtaaagtctcaagcgatgtaacactttcggttcctatgattgtcaattttgcgttattactaacagtgacattcttagtctccactttacgaccctgaacaatctgatctgtcgttacatgctgatcgtaaaaaagaattttatcaggaacgtaattcactgcggcataagcatcgaccaagccatagcccatgtaatcaacccatagcccattgggacgaccggaagtcgttttatataaataacctccgacctttttccctgatttttctatagcagttaccacttgcaagcgtgtaaaagtagggttcttcgatattacgagagctgctacacccgcaatatgcggggtagccatagacgttccactcttctggcctgtgctattgcccggaattgtagacaaaatattagatccgggagccacaacatccaacttcgtaccatatccggagaaagacgatttactgccatttgagtcaatagaaccgacagttaatatatcatcatggaaattgccgggataatccataactccagaataatttcctgcagcaaaggttactacacaccctaatccatcccggccttttgtcatggcatcaataatagcctgctccaaaatcgcactatgcatagtgtcgtaaaatgctccaccctgatcgccccaagaattagtaagtacatcagccccattttgccatgcccagctaaatccgctcgcaagttcagccgagaatgttgttgacaaatataggtcgtgactaactccgataatcttggcttcaggagcaacgccaaccacttgcagattattattccatacggcggcaacagtaccggctacgtgtgttccatgactcaatccattcacaaatacgctgggagatttgcccgtttgcgcatcatagctcaaggtatgaagattggcattcaaatcattgtggctgcggtcaatcccctgatctaataccgcgactttcgcaccggctcctcttgttatatcccacgcagcggtaacattgatatcaatatccggataagaattatttttcaatccccatagttggccaaacatcggatcattaggaataacgttcggcttgaaatcaaacataaatgcagggtccacatctgcgaaatgaccagtttcatagaagtagttgcttgcatctaccgaactgccgaagctggagttatgaatagacataatataccacaaaggcatataaggaacctcctttacaatctgaactttctgttcttctgccagcagctttaatgtggcgaaatctttctcatcctttaatttcaaatagaaaatatcggatgttccgatgggttgagcattcgcacctcggctaaagaatggcagaatgtgtttaatctgcttattttgcttgaggtcttttatgagtttagagtagtctgtagcagtcgatttcgaagtcaatctatatttgactacattcccgctccgagcgccatcttcttgtactaagtccagcccttgaaatgaagaaccggtctttgaagatttcaacgacgcatcatctgcaacaatattcacatattcagtattcagagtcaagggtatcttttctccgctataccagtagtagcacgtcgcatctgcccctgccgagcgtgtcttactcaggccgtcttgtcccggctcatcgacaggagcgtcagtacaagaaccaagagtaatggccagcaggaatagcatactgaaaatgcctattatttttttcatggtttcaagttttttaattatatctcgttaagacatataagagatattatattgagaagcacagagcgggttaccatccccgcatccgcctgttcctcgactaacgagagttgtcaccgattctctttcaaggcatttacctcggcttgaagagattttacggcatcgatcagcacggggatcaacatgttgtagttgacgcatttattgccctctttgtccgtgatgacagcgcccggtaagacctcctccaactcttgtgcaaggacgccaatctcctgatcagaagacctgcgatagtttttaccctcgttaatgaagttgtaggtgacaggtctgatccgcgagataacctccaagccttgtgagaaatcacgaacattggtcttggcacgagcatcggagtggtagtaaacattcagcacattgatgctgttatacttgttcgttgaggagttgtagaaagagatctgatcaccatgccccgccagccgggtgttttctgacgaaatgtcaatctggaagaagttcgtctgtgacgggagtttgaaatatgcgccgtttccggctatcgagaccttatagctcccaataggggtggtatccagcgacaagcggcctccggaataggtaagctgtgcatttgccgagaaaatgctgacagcagagaatagaattgtgaaaagcagcgtatggagagttgtaggtttcatatattcaagttttttaaggttaaaagtaatccggggtttggtttacccaaaccccggatttgggtattacttagttattatgattcgtgctgtttaaatatataatgggatgataaaatccggattcccatacaacattccaattttttgcaggaagattttgatttatagcattatatatcactctatcgatgggaatttgatcgtatacaggattcggccggactggggtgattggaccgatcgcgtttcctgtctcattctctgaaggatacaaccggaaggcaattccccgcaggacgatcgatccttttgcggcggcttcttttgcgggtaacgtattgaccgcatcgagcagcaattttccataaggatctgaaccaccaacgatgtaaccactgaaagaggacaaatagacgtattccaaagcaggaagatccccgaagttgaaattcttgagttgggtattctccagactgatttgcttgaggttattgcaattcagaattgtcaacccgccggtatcgctcaacgaatataacgattccggatagtccggccatgcgaacacagactcataatctccgatgtcaataggatcagttggctcggaatatgattctcctggtttccaaattcctttacttgtcgcaaaagtttccagattcgaacaattatccaaaataacctttgagtcgccaatcctgactaaatacagttctttgagatattcgtaccctgtgaagttgaactcccgactaatgaaatccgaaccgcctataatgcggatatagcttaacgcatgattcacgggcttgatgtcgatcgcacctgcattattagcacccttaaagtcgaatctggtcagcgcatagctgtaatccggctttgcctctccgtagtccagcacctcgccgataacgatcttacgggttttcgtttcgtcgaatgtcttgttgatcataaacgtatgctcagacgtcgtatagtccggaagatcataggcagtgtactctttcgagacctcaccatcccagcgtacccccagattcttggttgtagtcaccgaaaatcttgtgctggaaccagtgcattcgaactcgatcaatgggacgaatagattatctgggggcgtacctccgaatgactctccatagaggaactgcgcaaatgacttatcattttcggacaactcggttatgtaatcctcgtcgaattcgatgggcggaatattgcgggcaatcatctcatagaacggccagttcatcaccgaccactggtcgtagtactcggttttgtggatgaagaacgcctgatcttcgagcggatcgagtacgatcttcttcaactcatcccaggcaatgtaattcgccagttcattttcccagtactcccgaatggccgtttcgtttacactgccgtcggcattggttatccaagccggatggaacatcgggtgacggaactccagctccagaccgaggacctgaccgaaagcccgtagtacgtcactccgcttttgggcatctccggcacggcgccattgtgcaaagtgcattgtagcttcgctctgctgtccgtaaacctgcatatgatcggtgccggtcaacgaccagctcgacatcatgcccggcacatagtcgaagccgatacggacagtggcaggcttgtcacttcctacgaaatggaagcggacgccggcagccttctcccactctttagctacttccttaacatattcctgatagccggccgaaccgttcaggaatttgacggtcaggttattggccgccataggtttactccacactttcatggcgttcgcaacgccacgggtcgcgggagcaggggtattcagcatggctgcaccatagaaatgcggaacaaaggcttccgtttggtcagcctgccccgaactcgttgtttcatccttgctgcaacctgcaaagagcaacaacacaacagatagcagtaatagttttttcatagctgaatgtgttaggttaataattgggttatcgtctacatagatatgtagtttatatggttattaactctcagtttactccccgataatcggcggctggtgtctgcgttcttgatctttggtctgttgtgatcgtgattttgacagattgggtctgtctttatcgctgtctttggccagaaacttgtcaaaggtatattcttcgccagttagcgccataatgcgcctgacaatcaattcccgacagatggtattgaaataaaaatcggctgattcatccatcaaactataagactcagatcgccaaaccccaaatgcataataatatcctccttgaagcacacccacataggggtatctcggatgtccgatcagatgtgcccaatagaccgatttcggatcgctggtcagcgagagattcagataccaacccttcttctgttcatttctcaatcttgttgcttcataatccggaatctcgaacggctgtccaggatcgaatccagaagtactgtattcgtcacctaaaaggccaaaagcatgaccggccgtttcgtgaataaatgtccccattgacatcttacgtcctccatagacatagcctgtaaaggcaaaatttggcccggatatcggttcccgcatataagtaacccctcctttgaccccattgataacgatcccgaccgaatgtaccggcctttcatatgccaggacagggagacgataataggattccagcctttgttgtgcggtataaatgtaaaaccactgacggctgttttctgtttgcacacctaatgcagtctgaccgccgctgtcaaacgcaccgatataggcatccctcgacacggcatataccatgtgtacgttgaagtattcgcggtaggatttggtgggttcgatggcaaagaaggattccatagcaaactccatgacctgcttgtagtagcccgtggcaatgtctacgtcggtaaatgcttcgccgatcaatacgatgtcgatgcccttgcccttggtcgcccgttgcagggtctcgaactgcttatccatcgagaagtcggtactctggtaggagctgttgccgaataccttcttcaactgcgtgttcaggtcgtccgtatgctggaacggccgggccatgaaatctatcagaaacggctcctcggggtagaggcttgtggagcaatactgccccgtgaacatgtcgttggagaacgtgccgtactgatcgaccagaaaatagctcggataaggttcggcaggcagaatcacgcggtgtccctcggcatcggcatagtccgtcaccacgggatagggcacgtcgtgcgtgcggaggtattgctccgctgcctgtttgtactcctccccttcgggagtgatcgccaccacagcgaagccctgtccgccgaagagcgtatgcacccgccggacagtggtctccagaaaggtcttcgaatcctcctgcaagggattccagtgcaggatcatcgtccggatgttgccgctgtacacctcgcggatgctgccctgcgagccgtcgcgcaggtcggtgaaagtaaagtccggaaggtggatatccttgctgtatgatactccaccggatttaccgtagtcttgccggacacactggagggcgatgcggctccacagaggatggttctgaataacgtccgggattttcccatagagataattgttgttcaggatcaagtctattggccgcccgctttggaacaaatgcgcccaagtcgccacccaactcgtgatcttattgaacgacagatttatatactgcaatctgttcagtttggcccaatcgggaagataaccgccctcgatgcagttatggctgaggtcgatcgtttccagttctatcaggtcgtccagacaggtaattgagtgcccttttccgtcattgacgctgatggggccttcgagcgcattccaactcaaatccagatgccgcagcttcgtgagttttgcgatctcccacgacacggttcccgcgaggttgttcttcgcaagccgcagggccgtgacgtgcccctcggcgtcggtctccacgccgtaccactcgcccagaggcttgtcgctgcaccagttctcgcggtgcgtccagccgccgccttcggccgcgtcgtagaatgcccgcagcgccgagcgctccgggtcaggatcgtcccacgcggcctgcacgacggtcagttcgtcgaacaggtcggacgccttatccttgaacacgataagccccgtgcgttcccgtgcatccggattggcagagatcgtgaagcggtgtgtacgctcttcgagccccggtgcggcccgcgattcggggagctcctcgatccactcgccgccctctttcaccgatacggtgtagtctacgttcgactgcacctctaccgtgagtgtccgctcttcactgccgatttcaagccggttgtcgcccgcgatgatcgcgttcttcttcgcctgcgagacctcgatgcgctcttcgagggtttcgccacgcaggataagtgtaaagcaccgcccgacatactcctcattcgggtccaccttcaccgtaacattaatctccccgcccgcatcacccgaagggggagcgatgtcgtaccaagtagcggcatcgatggccgattcaggagcggtctccgaggtaatacgccacggctcattggtcgagaaaatcaatacggcgctcccgccctgcgcaccgaaaggcgcggcgggtagtgcctgcgtgatggttagaaaaggtttgtcgggatcaggtggtacgggtggattatccacgttgtcgcttctgctgcattgcgaaaagaataacacggcagaaatccagagaaacggatgcgtgaaacatgggaagggacgtgtcataaccgttcatgttttagaatgatccaagttatcgacttttgctcaatataataaaatatttccaagaaatcttcgaggctgtttctcaattattactcgaacgcccgaattttctactaataaatccatataggataattttgcgaatagcacaacgattcgggaaatcggtcaattttcgtatatgcgcagaaacgaatcgattatgaagacttcggaccgcaggtcagaatggctgtatctcggcaggtattgaatataaaacacgcgcaaaaaggacatttagtagattttgttctggatggtctgtaaaaaacgtcgcccataaaggacgacgtataggataaagtgtattcggttttcttgttactctttcaggattgctgtgtgcgacatatcccggacgattataccctcatcaaaaagttcataggcggactatttttcctctacttgttgtaaactataaatttctttctgcctttcaatctcctcgcgtaactcttcctctttgggcaggtaggtcaggtattttgcagcaaatagttgtggattctcatgcagcaccgaataccgggcgatgtcgcggctggtttccgtacagaggatcaatccgatggtcggattatcgccgtccgtgcgtttcaactcatcgtacatgcggacatacatatccatttgcccgacatcctgatgcgaaatctgggtggttttcaggtcgatcagcaaaaagcactttaaaatgtaattgtagaataccaggtcaatgaaataatcccctgcatcggtagagatatgctgctgccgggcgacgaaagcatagcccttacccatctccataatgaatttctgcaaatgcgtgaggattgcactttcaagccgggattcggtaaaatccatgttggacgccaagcccagaaactctgcaaccatcggattcttgatgaactccaacttgtccttttcatacgccgccgtcagggatttcatttccgatacgaccttttcctttttcggtgattggagcagacgatgatagtattgcgacgatatattgcgatcaagtgtacggacgctccacatttcttgtgcagcttcattcaaataccagatgcgggccgcatcgtccgtaacccgcaataaggttcgaatatgcgaccatgtaagatttggtacacgcgtgtgccaaatctcatcatggggaaaagatagatagaattgcctgtaatttcgcaaattgcgagccgagaagcctttgccgaatgccgcggacagttcttcggaaagcaccttcaataactgcgttccatattccgcacggctcttgccatgctgctcctgctctacgatccgcttgccgatattccaataggtctccagcatcacggcgttgatggcagcataggtattcagacgggcatcctcgatcagacgtttaatgtcgtcgataaacgtgcgctccagtacgggtttcataacgggttaattagattggaaaaaagataaaacaaaggtagaaaataatatccgaattaccctacattttcagctcctcgaagaattcctcgaaagtcaggccgtaatagttgcagagtctttcgagagtggtgacggatatattgtaaccgccgacctcgctggccgtgtatctcgtagattttattttggatggtctgaagttccattgttcggggtgagtaacggggttcattcttataaagtttgcaggaaaagaccggaatcttttaaaagcatcacatttctttcaggtgttctctcatcttcaagccggagaagagtccgggcgtgtcactggactgtcgtaggaataatttttaaagtacaattttatttttcttgaaaaattcaactgcctgctcgaacttctcgacagaagcttcaatattatttgcataagctgcaaaatttttgctatactctttcattgcatttatttgctctgcaattacaaaaactttacctgcgagaaaatgcgtctttataattgcaggggttctttttacaacagagctgtcaaattgttttatcactaatataaggttatgtaaccgtgaaaattgcggatttactgatggaatggcgtttaaagcaacggtaataagatttgtcaaaatagagtaatataccttttctgaggacatcataggcatattaataattctattataatttaatgctacatcctgctggtaggcaggccaaagctcattccattccaaaagaaatttattgctgtatgaattataatcgtcgtatatctttctgatctcaggttgtatgctgattaaatatgatacacttgacaaataggaatttagtttttttccttttatttcatttttttctgatatacctcgatgcagggaatcagtcagccgatcaatggtaaattgcgaaagtacatcaatggtaatttgctgcactggaaaggcttgaggcagtatttcgtccgatttcttaattttatcagcgagcgtctttatcgaatgaatgtacttccgcaaaataggtatattttcttctgcccagattacgatagcgtcttttacaacctcacgttcttcctgcttttgttttctccgatacaaaatgttaatacagactcctaaaataaaaataccgagcgagattaacgccggtaatagaatgtcccaagacacaccaagaaatgtgttctgactgtgcgcaacaatacaattctgtatatcggaaaggcttgtagacatatccgacagtttcgaaatagcaaggctgtctgaagcattgagattgtagtcgagccgatacagcccctcttgaatgtcatcgagtttgagcagtagtaatttgtctgaatacatattcccttattatttgagcgtgatttccgggtgtttgtctttccaagagatcaaatccttgcacaacttccgcatgaaaatattgagctgatacaaatctttctcaggacactcgttctctgttggtttgaaattggctttcgcgtgtacgatactattcctcgtggcataaagaatgaccgcaaccttattcttgatcgtcctttctttctccgccacaatgccgatggcggattgttgtttgctggcttttgtttctttgagacaccgctcctgcacccattctggaaggaattcgtagagcttaacgatgtcgcattgttccattacgatttttacaaggtcacgatcctttatgtgtttatcgtgtgccctcatggataatccggaatccagagaatcgacattcccagttgccggaatcccggaagagaatttccggcacaactcttcatgggccttgattttggcgactattggagagatatactcgatcaccttatagaaatacaggaatttaatatcgttatttcttattagcagggcttcagaatataaatccagaataggcgaacaatgaggtaaagaagctatttgaattggatgtgtttgggttgaatcctttgtcaaatctaatttgatcgtatatttcaccttgcgaacagaacggttgtcgagagaaaaatttataaaattgtatttatctatcaaatagtacaaaacacggttaataatatcactctcttgttcttcgggtaaaacatattccggggaatcatatcttatctcaatggcagaaaatgatgaacatggcgaacataatcgctcatcttcagtgcatttctctacattatttaatagccctattagtaagggactctcaaccaacaatacagtatagtgtatgtcagaaaatacatctatgaataaccttgcatgttttaggttaataacagactgccttatactatctgttcggactgtactttcgtttaccccctttaaggattgtatattattagtgtagagtaaaaaatcttcaacaggatatattatgtaatctttttcctctgcaaataaaatttcaatagaatctacacctatttttacatctttatatttaacatcataattattcgccaaaaaatcaagccgacgcttgatctcttcgatattttcagatgtaatgtaggtattcatattctccttatattggtgttacatttccaactcccggaaaaactcgcccagcgtcgtgccgtagtagcggcacagacgatcgatggtgtcgagcatcggattgaacaggccggcttcgatgttgccgacattgatgccggtctcctttatcacctctttttggcccttgcccgcggctttgcgcagttcgcggaacccggccccgatcctattgatcacctcgttattgcggatgtgtttcttgctcatggtcgtcgcttatttccggattgtcggtcggttcaggtgcgtcggttgtttccggctcaacggaaggcgtgaaaaattcatgtagggtcgtgccgtataaggtgcagagggcatggagtgtcgagatggtaatgttgttgcgccccatttcgatatgctcgacacggacgcctgtttcaaacaacaccttttcctgcgacaggccccgcgccaaacgcagttcccgcagccggtaggctatgtaacggacaagttcttcgtttctgggaattcttaccataatacaaagaactcgaaatctcaaatacattatgttgtaattgatttgagagaataaaaaaacaggctaaataattgatttaccgggtctttttcggaacggaaatcgtgtgtagaaaggaaaataatgtatatttgcggcagaataacattcgacatggagactttaattgcagatagtgacaggcggttcagccgtagttcaggcaaataagtccgtttaccctcaataatatacgggcagcgggctgacaagcccggcgcgatgattgtaccgataccccggtgacgggtatttgtgcgtcgatgcagaccttcataacggcccagatcgcccattacacggaaaaaatagaaaaaaaagatgccagccctgtaatctatttgagaaaaaagttgcagaagaaagatttagtacttacctttgaattgcgaactcgccgaaaggcgtgaatcgcgttgctgccccgtaaacgtggaaatttacagtaaagcggcaataagaggcgtcacgacgggtcgtaaccacgctcgtcggaaagcagtactttacaggcactacaccttgacgggcgtgggcttcttgtgttattaggctttacgggtattccacgacctacgggacatagtaacgcaagcacgcatacctctcgtgcaggggacagcgtgggcctatcctcgataggccgggttcacgttccgtctctttttagtatagggacgatttcggcggatagcatcaacttaaaacgaaaaagttatgttatctttgcggagtaatacacggcctttgccgtgacatattgtaaagaataaaggttaggacaacctttacttgttcccgctaaacttcggactaccttttaggtaggtttaaggatcgacgtaaaattgtctgaaacctgtgttatgtccctacacctcggtgtggggacgggcacgggcgtaagggcagatcgtcgatctgaggctccgaaggccgagcgggagaggtctgtacctgcgctccgtgtctttttaattgacatcgtgccgggtgcataggttatccgaaacacccggcccgcagcttcacacaggagcttcgggcgcaaggacagtaccagctaaggctccgaaggccggtgagtggactgcacctgcgctcgtttttcgtaaggggccgggaaagttgaacaacaactaaccccggttacaatgtcacggaaaatcaatcagaagaaggaggcgtttttggcgtccggcggtctgctcagatcggcgggcttagctgtgcctgttgccggggtttcttctatatctaactttatccaccaagctcaccacctccccgcgatgcaacagcatccgggccgggtgcggggtccgcatttctgcatgaagttgcgtcactacaaaattcttcatagtgtccccgcgcccgttttttctgcctgcaatctggtccggtctcccggccaaaacgctggcgctatcacccttaaaaattatgccccattggaaaacgggccgcagagtcggctgcataattttagggtcggggccgcaggcccgatcaacctgcgccccgtttttttctcgaagttttaccccggcaatttgccacggccaatatattttaaaaaggttaaatttgaggttattgtaacttcgggcgagtgcaaggaagcccgatccgccgtgacatttgccggggtttcttctatcaataccaaccaagctaaccatttgaaccttcccgcgatgtcgctgcatccgggccgggcgtgggtgacacatttctgtgtgaagttgcgtcactacaaaattcttcatagtgtccccgcgcccgttttttcaccaaacgcaccccggtataaacttaaattcggtgtggttccgaatgtcggattttcccgatgcataggcagccgcggtgcgcttttttctccagccactttcccaagtggagttttcatagcatcagaagtaactccgtcctgcaaacctactgcgggacgtgcgagcaggttgattcgccttgattcggatgcagcatccccaatgcagtccgtctctgcgtgcggatcagccggctcgctttcttctcaccaaacccggatttccccatgaaagagaacttgttttacctcccgccctacgaggacgaagcgacggccgaaaagattcgggaaatctacggctatccaatcaggtacatgaaacaatacctgctcgacttcttcacggccctgtacgaggaacagcatcacatctacgtgctgctcgaaaacctgcccctcgactatttcgctgtcgaaaggacttacgaccgcctgctgtactggaacaaccgcaacggcagccatgaggtagacggatggctgtacccccgcgaacgatacacgctgaaagaatttctggcgaaaaaacgcaccttccaccgtatcgacgaattcgaactcgttgctctggggacgagttttacaaacagcaaagcggaattaccctcgcaaaagctcctcaaacagctctacatgaaattcctgcaggaacaatgcgaacgccatctgcggctcaatactcccatccggctcacccccgaaatcatcaaccgctacggcctgaccaagtgggatgccggaaagatacgtccctacatcaaccgcttcaaccgcaaagccaagacgaaaatccgggccgaattcgacaagctggccgcgttggactttatccgcgaagaactcgaaaaatccggcacaaaatgacacgatcccttaccatacggcggaacatgcacggcgaaaccatatcgtcgggcgtcgtcgcgccgtgcggcgggaaatatacagggacggcagtggctctgaaatctggtaactcatgcattcgccgcgtgaggatgataatcccggccgtcccttttttcgacttcaccacaaacacgatatatgccgccgttcttcgttcggttcaagcctatggcaactcggacgaaaaggacggttattgcgggaaggcagagacctccgcaccccatcccgattctcactgtctaaaaacaacggcggcacaactcttaacggatgcggttccaccccaagcgtccatccggacgtactcccacaacaatcaagtaaccggaaccgcatccgtatctttacccccggacaccaacacggccgaggccgagggtccgggctgcaaaaacccgaatctaaataaaaccaatggtgaccaacgtgcaaattgtcacggcttatttacagagggtcgggatgcgggtcacacgtccccgcatcccgttatcacagcgggaacagcggaaaagggagaatataacgaattaagtgaggatcgcgcggatcgggtaagtccgcgcatccgccgttcccgctttcttcaaacccatcacccggctttatgccgtggcaacagtctgggggcagtttactgtgtaggattagacattcaaactgggaacgccggttttgcaagagccggcgatgttgctgccccctcttttcgatcccaccaaccaaatctaaataaccccgcccggtgcgtcgtgtacgccgccgggtacaggacgggcgatgcaccaaagtctgttagggcatacgatggcttacatcgtcccgtcctttcttttgctccttccgcggaggcatgcagcttcccgcgccagccgggatggggaaaattctcggatacagccgcaataatctcccgatccatattaaaccaaaagatcattattcttcggcttttcgcacccgccatgcaacggcatatccattcttgatatagggggggcgaaagcaacacaatatccattgaaccttcgattacttattttagttgccgtagtctctaatactatcatgggaccttgcttcatgctcaggcttaaaatatttattatgattttcaggtgcgaattgggtttcttctcccaatgaatcgtctttactaaaagttacaattatgttcagatagaaggtaaataacgtagaaccactttaaaactaaaagccgcaactgagtattttgcttttttatgccatgtcctattaccattaatcatcaagccttccccaagaagccttgatgacaccctttctcccattctaaatttctcagttcatccgaacgcagagaactattacttttcctatccggacattcatagttttcaagctgcacatggaagacaattctgccccagagattcccagccctggggtttttgtttaatcctaacacttaaatttatggacaatctcctgatccaagaggagttgctatccttgttgaaggaagcgacccaagcctcccatgtgcagttggaaccatgcgtctggcagaatgcgtatgaaaacttctgccggcatgccgaaaagctcaccgaaagcgaatgttcttctaaagtcatgcggaccatcgatcacgcccgtatcgaacttgagcaaatcccaaaacgtctgtatgcaatcccggaccgggatacaacggcagaactttactgcagcaaagcgttgaacgtgctgcgcggagaactgcgaatcatcaccttcgagctgtctcatccgacctttgccggacaaaatgaaaagatgtttgtctccccgctgcatctgagcgaagggttccatcctacgaacttggtggaaatcattactcctttcttcgaaatgggactgtgcgtaacggcagaaaaaagactcgcaaaactcaccgaaattatccgggtcttcgaatgggcattcaatattacaatacccaattatgccgtactccgcaacgcagccatcaaccgcaaaatccaccaaacacctctgctcgacaaaatgcgggagatattgatccgcctgagtcaacagtaacgcctaaactttccggggctgtttctataacagcccttttttcctcagtgtcctgagagacctatgagtgccaatgagtgccaagacccagaaatcagcaccaaaaacatccctgcaatttacctttgccggacctaaatcttaacggcatgcaaagcgaagacgacctgagaggacttgccaaagtcatgcaatttatgcgggcactgagcattctcattctcctaattcatatctactggttctgtttcgactggatggaatccctcggctgaacgcacccgaccataaaccgaatcctttccggttttcaccgttcatcgcatcttttcaaagctcctatctattcaaaacttttctgcctgctattcctcgctctttcatgctgggggacgcggagcgtgcgcaatgaacagataacccgcaaaaaaatcatctcctgcttatcactggggaccctgctgtttttcggctgcggcatctttttacatatacgcggggacataatgctcctttgttccctgtatgctatcatcttggcgatcggatatgttttcctactcaccggaggcatctggcttggacggatgatgtcggagcgtatgatggatgacccattcaacgatgagaatgaaagtttcatgcaggaaacccgattaatcaagaatgaatattccgtaaatctaccaacacgattctattataacaaacaatggcacaatggatttgcaaatgtagtaaatccagcaagggcagtcgccgttatcggcagcccgggcagcggaaaatcctattgcgtaattaatcaattcatcaaacagcagatcgagaaaggtttcgccatgtatgtttatgatttcaaattcgatgatctatcgatcattgtatacaaccacttgcgcaaacatctccactgttacaaaacacccccgaagttctatgtcatcaacttcgataatccgaggaaatcacaccgatgcaatccaataaatccggcatttatgaccgacatctcggacgcttacgagagtgcgtacaccattatgctgaatctcaataaaacatggattaccaaacagggcgattttttcgtggaatcgccaattattcttctggcggcaattatctggtatctaaaaatttacaaagacggaaagttttgcaccttcccgcatgcgatcgaactgctgaataaacgctatgctgatctctttgtcatactaacctcatatcccgcacttgagaactacctgtcacctttcatggatgcctggcgcggtggagcgcaggatcagttgcagggccagattgcatcggcaaaaattcctctttcacgtatgatctccccgcaactctattggatcatgtcgggagatgattttacactggacataaacaatccccaagaacccaaagtgctgtgcataggcaataatccggaccgccaaaatatctattccgcagccctcggcctctacaacagtcgcatcgtccgtcttatcaacaaaaaaggcaaactcaaatccagcattatcatcgacgagcttccgacgatctactttcgcggcttggataaccttattgccacggcccgaagcaataaagtcgctgtgtgcctcggactgcaagacttttcgcagcttacccgcgattacggggacaaagagtccaaagtcattcaaaataccgtcggaaatattttctgtggacaggtcgtaggagaaaccgccaaaaccatctcagaacgtttcggtaaaatcctccagcgacgtgaatccatgtcaatctccccggaacaaaaatccacgtcgatcaacacgcaactcgacagtctgattcctccctccaagatttcaaacctcagtcaaggcatgttcgtcggatcagtctgtgataatttcgatgagaaaatcgaccagaaaatattccatgcccagattgtcgttgacaacgacgccgtagcacgcgagactgccgcttatgtcccgattccggatataacaatctttcaggatgagaacggaaatgactgcatggaaacacaagtcgaggataattaccaacgcatccgttccgaggtcaaccaaataatcaaggatgagatggaacgcatcaaaaacgaccccaaactccggcatcttattccccagcccaaacagcctgcaggcggaaaataaaccggatcgctccttggtccatagtgtcaggaacggactgcgagcgccaacgggtgacacggagaacaatctaataatcagcaatatatcttcgcatcataggaccactaaaccttatattttttaattatggcaaaaaaagaaaaacaaacagaaccggcggaaaaaacgatgcccgttcgccctgatcccaacaaggaaaccatcctgctacgctatcctctggatggcagcgtcaaagtcgtcagcgccctcaaggacgagaagggctcgccgagtttaatctgggttgaaccttccgggaaaaaccagcctcgtttttacgagtgcaacaactgccgcgaagtcgccaatttcttcgacatggagtaccgtcgggcgttcgccgaaaaccgcgacaggaaaaccattcctgaactctacaaagttcccttcgacaaagtagggctgatcggcgaggaacttcgcaagctctccgacgatccccaaaacgccgtgattcttgaaaccgtcaagaagtaccggacctacacggcacagctcaaccggatcaccttcgacatcgcccgtatgccgatcgcggaactggccgccgagggcttcgacatcgaacaaatgaaaaaggacggagccttcaaactgctggaagtcggcagacagaccaaattatacccggtcaaagcggtgcaaaccggacatatcaccaaggagagtacctattctctgcactgttttttcgaccaaaacggggaaatcggcttcaaggctcaatctgctctttccgaacctgaataccgaacggacgaacgtctgcgaagggaactgacgaaacaagacatcaacgatcttcgcgcgaagaagaccctgaaccgtctgatgcagcatgacggagagtattgctttgtcggcttcaacaaagatactcagcgcatgatctatgttccctgcaaagatgtcagaattccggattacatcttcgggcaattcatcggcccttcgcggaaacaagaattcgaacgcggcggcagtgtgctgctggaaaactgtaattactccggcaacgacaaccatttctccggtcatgcgcatttcgatgttcaccgcagggattacgtcgtagacgacccgcattacgaacgtccttatctcccggaacatatcaggacccaaatgccgaaagaagaggtcgataaatatttcgccggcgaagtaatgaaaggctaccgttacaaaggacgggacggaaggccattcacccaagatttcagacttaacactgagaccaatgcctgcgagttcatcgactatcagaaacaggcagcaagcctacagcagactcagacgcagggaccgatcagtgatcctcccgaatcgatggagccgcaggaagccccctatatggcgcctcacatccccgaagaaggacaggaccggagtcagggcccaaggatgtaaaccaaagccggtcacagccggcgaattcttcaaggcatgaaacgaaaccaattaacagaccctctctattaccggaaccgacttgaagagttcatccgggagagacacccccggctcatccatgcttataaactcatcggcacacgcagtaatcttgcggcccagacttacaaggaagctattgaatccggtgaaagccctcttgcggcttcagcccgtgccgatacagtcctttatgaagatctgatcttctcccgcttcgacacgctgcgatgtattctggcaactgaattcccgatgattcccgcccatcggcaacgttcgctcgccttaacgctggaaacgtattgcgaagatgtcttcgcaagatataacctcgatgatggcatggtagcccgcagcgaatataatcacttgattgttgagctgacaaacacacttcgaatctattttcaacaaaacaacatttacacgccacggcggggacgcccggcaaaccaacgataaaaattacaactgtcacaacagaaaaaacactattaacaatgaaaaaaatgtttatcgcggcgctgaccgcactcgctctgtattcctgcgacaaagacgaacccgcaaccggaacaccggaccccaagcccgatacccacggagcaaccgtaaccatgacgttcaccgacgaaaccccgacccgtgcgttctttgccgaagccgcggccgccgaagcgtgggagaaatccctgtcctcgctctccgtgtacgtgttcaacgccaaaggcgacctgatcgtgctgcgcaatttcacagcatccgaactcacggcccgctccgcaacgttcgccctgccgcatgccacggccggtacgacctgcgacttttatgccgtcgctaatctgtcgctgtcgggcattgccacgaaatccgcgctgctcgccaaactggagaccgccgccgccgactacaacggcacgttcgccgaagtttcgaccaaagccaagcgcagcgggggcttcgtaatgactgccggagtgagcaaagccgttgctgacggctccacgacatccgtgcccctgacactcaaacgtaccgtcgccaaagtcgccgtgcagacatccatcgacccggcgttcgccagcaagtattccgggaccctgaccgtaacgggtacgaagctgctgcgggccgccagccagacgccgatcattgccccggccacgccgacacccggagccatgagctttacccacacacagactgcgacagcaacatccgggaagtataacaacctcttttacctcttcgagaacggccccctcgccgaagcaagccgcgtagcgctggagatcaccgcgacatacgacgccgacgggaacgcatccacgaccgccgaccgcatggaggtagtttataccgtaccgctgacaggcaagaccgggggcgagatcgcacgcaacggctactaccgtatcgcagctaacctcacgggcctcgtggggcaggattgccaagtctccgtgtcggtcgccgagtgggaaagcccgatcacgcagtccgtcgatctgggagcataaccgaattattcaccaacaccgcccgcacctttcggggcgcgggcggtttaaacaatcacagatgaaatatttactgttcgcattgctttccctttcgatctggtttacaggctgcatacacgataaaacagccgcggatgcgccgataaaaaacgtgtccgtagaggtgggcattacggcccgacccgcagaccgcattacccgcgccaccgacgaaacgcagattaaagacctgaacgtatatctgttcgggaaaagcaacacattcaaacttcacatttatacgcagtcgccgctcttgcaattcgaatgtcccgtcggagaatacgacctttacattgccgcgaacctccatgcggatatggcagacttatccccggcagaactcgaagcctgttccatagcttccagacccgcgtatgacgatctgccgatgtcggcgaagacaaccgtaacgattgcagcttcggcgcagggagaggtggttacgctcccgactattgaggtccggcgttgcgtggcgaagatcgcctataatattcgtgtcgccaatactgcaggggacatcaaacttcaatccgtgcggctgatgagtattccccgcacctcgctgctgttcacctccgcccggccctccgaaaacaaggccgattatacttccggattctactcggaaatcccggccgccgggggcgcggcattttcgggcgtatgctatatcttcgagaataggcagggccgcgttccgggcattacttcgcaagccgacaaaagcgcccggaacgcccccaaaaacgcatcctatttgctggtgcgggcggttcggggtgggaaagtactgtcatattctatctattttggagaaaataatactgataatttcgacatagggcgtaacacaatccagacattcaatatcaccatcaatggggacaacgaagtagatacccgcatcagcagctacacccttaacgtgtacgacacgtatgccggcaatatgatcggcggctattgcctcaatgatcaatatggagaattgttaatcgaggtggatggtaaccccgcacctctgacgctttgcgggcggataacggcttcgggggacacggggcatattctcgtgaacgatactcccatcggttccgggcgtgacctggagctaacggaccagccgggattgaacgaatattatttgcattacgacaaacccgtatatacgtctgccgattcacaattctcctacaccgtgacaatcgaggacgacggcggctatgcgcagtctttcaaatttgaacggcgctttgccaacaaactcgacgttatagtcgatacccctgacaatggcaaaggcaaggtgaaagtttccgacgcgctgtattccgtacaggtcaccggagtgcgtgaccatattgcaatgtgttacgaaatgggctgcacgctggtagcactgcccgcggcaggttatcggttcgagggatggtactccacggatggttataagacgcggctttcaatatcgacaacctatttctatgtgccgaaatcggccaacgctgctatctatccgaaattctcgcctgcgacatctccgctggacagcgacggtacggcaaattgctacattgcacccaaactgaatacagaatattccttcgatgcaaccgtgcagggcaacggcaaaaacacgaagaatatttgggccctaaatcttaacgggatttccgctcgtatgctttgggaatcggatagcaaagttgtcgaagatgtaatgtttgcagacagccgtatctctttctcgacggggaccgtgcggggaaacgccgtgataggattgttcgacgttacagataattgcatttggtcgtggcatatctggtccgtggattacgacccggcatcgacagcacagacctatgtttccggggccgtgttcatggatcgaaacctcggagcgatcactaccgattgcacacagcccgcatcccgcgggctgtattaccaatggggccgcaaagacccgttcatccatccggcaagctgcaacagcgatgaacgtgaaagagtggtctataccgaaggattcgcatttaatgtcagctatccccggaatgccggaactgaaagcccctatgacgtaatgaccgtagagtggtcgattgcccacccgacaacctttatgagcgatgccatgtacgaagattgggaagaatgggcatctgttgtggattggctttacaatcatcatccgaatctttggggtaacgtcacgacaagcaacaacaatatcagcaaggtaagctacaaatctatctatgacccgtgccccgttggttggaaagttcccagccccgaagattttgccggaatcgagcgggtaagtcagtcgtcgccctattatgtaacgattcattacaatggtaatcgtaccacgaatatcccgactggagggactttcgttgaaacacgctttatgaataacggacagctcggacggctttataccaatgcgccctactatatgttctggggaacgtcatcctgtcggtatggcgatatttcctgcacctcgattattttctcgacgggttccgtaccctcgtttatcgacacttctgattactatcgttacgccgcaaatcccatacggtgcatcagagaataaaaagccatgaagaaaagacacatcatcattttatcgctttgcctgctggctttttggggcaaaccccagttggccgcagcgcagtttttcagcgccaaagtaaacgcgttggccgcactcaccgcaacggtgaacgtaggagtggatgccgccgtcgcggacaagtggacgttagacctttccgcctactggaatcccgtaaactccgattcgttcagttgtcggctgtatgccgcgcagatcggcacgaaacgctggctttacgaagcgttcgtgggccatttcatcggcagccagctaacctatggaaattacctgtacggcggttcccgacgctactacaaaggcggaatggccgggctgggattcagctatggttatgcttggctgctctcgaagcgttggaacgtcacggccgaaatcggcatcggggtcttttacatgaaagacacccgccgcgaccgcatcccgcccgaatacgaatccatcttcatacaccactacaagcggtgggttgtaggcccctcgcgggcagagatcagttttaactacttattctaaaagcagcatgaaaaaacttatttataccgtcgtctgcatgatgcttttttgctgcgcctgctcggatgcggacatagagcttaatccggcgacgcaggccaaacagcagcttgcaatgacattccgctgcggggccatgtccccgacacgcgccgcgacggacgacacccgcattgacgacattaacctgtacttgtttcctgcgaacggcgacccggcccgacacctctatattgctccggtgcgccccgtcgtactggaactgcccaaaggcgactacacgctgtatgccattgccaacctcggacacgacgcaggcgagcggacgcaggatttcgttcgtacgctgcacgtcgaacgggatcctgcggtcctcgcggatgctccctttcccatgtccgcgcagcagtccgtcaccgtgcgcggtgacacgcagatcgccgtatcgctcattcgcgccgtggcaaaggtcaatttcagctacaccgtggccgcggatttcgcaaagtctttccgcgtgaagtttatacagcttcgcagcgttccccgttctgctactcttttcggctccagccgcgccgagagcagcgaagccgttgccgacatgccgcccatagaaacgtcggccacgacctatgccgcaacctactatttattggagaacaggcagggagaggttgcaggtatcggttaccagcagcagaaagaccaaacccgcgctccggaacatgccacctacatagccatagcgggcgaagccgacggaacgcaggttgtgtaccgcatttacctcggcgcgaacaacacgacggattttaatgtcggccgcaaccgggtttacaacatcgacgcccgcatcctcggcatgaacaccgtggactggcgggtatcgacggcagaactcaccgtcacgccatttgccgggaaccatgcgccgggggaacttgcaacaaccgaactgcggcttacatccacgaacgacaccgaaaatgtctattacttgtcctatcatatcgacgccgggacggggatagtcgccatcgacggtgtggaacggaaccccgacacaccttatccgctcttttcgggcaacggaaccgtaacggctgacatcagctatacgcaggcagagccgggcgacgtgcggctccgcctgacggttacggacaaatacggattcagcatggagcgcgtgctgacaacaggattcaagaacccggagctgacgataacctatacccagcagggaaatgaactgacggtttatgaccgggcatatatcgactataccgtgtcacaacccggttactccgggaactacaccgtaaaagtggaaggtgttccgtccgtgtactatggtcgctatggttccgacgttcctctgacaacattcacccaatacgggaacggcagttatacgttgcgtgtaaaaccgaatatggtcggtcccaatcccctgaaaattaccgtcacggacgccgacggccacagcgcggagatcatcacatcggtaatgggtattaaggccaccgccgacctcaaaccgacattcagcacatcatcgggtctgctctatgttaccgtggaatcttcgcagcccgtagtggacgacctgaccgtgaaagtgactgccaatgcggatatatattctttcggcgggaccgtgacaaagaagcagtatatcgtaacggtgaagatcgaagccgaccacacgacaggaaaagggtctgtatcattgagcggattagggagttatgcaacgttcacggtggcatcctacaccgcagaatttaagcgcacatcggataacggattggtcgaatataaattgcagtagaaaatgaaaaggataatgaaaactattgccgtatgcttggccgcgttgctttgcggctgttcgataaccgggcatctggaacgtcgccaataccgcgcggacgtgctgcacgtcagccgcgaacagtacgaacgcgagcagcagacctaccagccacccgcgttgaagatcgagcgcgatagtaaccgattttacctcgtgccgacagaggtgcaggagaacggcgaacgcatcatggcgatgcagatacaggaggtgacgatccgcgccacaacccgaacgctcccggaacgactggggaaagttacaatcgactttgtaattgacatgccccggcaattacagggtacatgccgcagcatcgcggtaattccctatctgcataaatacggagaagcacatcccctgcaagacattaccatccgcggaggactgttctcccgtgttcaggaccgcgattattggcaatacaacaaatacctgcacgtattcaacccctcggaaatcggagccgaaagagctttcgcccgctttgtaaaatatccctacagcgaaggctcacgactggacagcatcgttcaacatccggggcatatctcatactactattcgcaggaagtacctacggatgaaacctcgaaaacgatgcttgtcaccttacagggctgggttatggcactcgacgagagttactacaaactgcccccttccgatacgctgacctaccatgtgtcatcaatgctatcctttgccgatacaaccacccgctataaaatcaaaataatcgaaaaatacgccacggttcaagacagaaactacatccaattccgcctgaacgatacgcacgttctcgactccctcggccggaacgccgccgaacttgacaagatcaggacacgtatggccgggttgatcggccagcgggaatttttcgtggacagcatcgtgctgaccgcttcggcctccccagaaggccgttatgcccgcaacagcactttggcgcagggcagagcccatgccctcaaaggctacctgcgcaaatgtatcggcccccaagtcgatacacttatgcagatacggtggatcgcagaagactggcacgagctgacaacccgtatccgcagcgacgagaacctacagcaccgcgccgaaatactgaagttgatcgacaccgactccgatcccgaccgccgggagcggacaatacgtgaactatatccgcaggattaccaatacctcaaagaatcggtttatccctcattgcgtgctgtgacgatgcgctacgacctgcggcgtgtcgggatggtaaaagacaccatacacacccgagaagtcgataccgcctatatgcggggcataaacctgctacaaaaaagaaaatatgcaaaggcgctatatatcctcaatgactatcgggaccgcaacaccgtgataacgctcctttcgctgggatatgacgctcaggcgttggaaatgctgaacggactggagcgttcgcatacaaccgaatacctcaaagccgttgcatgcgcccggctgggccgcaaaaccgaaggccgggaacatttcctgaaagcctgcgaattggacgaacgaatgctcttccgtggaaatctggacccggaaatagctgaacttttaaaaaactaagaaccatgaaaaaactcataagcatcataatcgtgcttctggctctggtaagcctgacgcactgcaaactggcggaagttgaagcgatcgaagaaatcccatgcccggagatcggcatcgattcgatcattattccgccgtgggacatggaaacagaacaggagatatatccttttatcgaaaaccagtaaatacattcgcaatggacctttttgataaagaatccggcagcttatatctgacctacgacaggttccacaacatccttcatgcaagtcgggaaggagagggaacagatggctttctccgacatattcacgacgatgtttctcttattctccaagaaggacatgatcctaatgtctggtttacctatttcgaattcccggacaaacgggatattcccaatttggcgcttaaagacatgtcacttttcttcgagaaaacaacacgtgccgcagaacgctccaatgcccgctgccgctatacggtcaatgccgccgatgtcatctattgcttcaaaaacggcattgttcccttaacccctcaagcggaaaaaagcgtgttgtgccaacaggaaaactaccccctgcccacagacggcttcgggaacaataccccgcaaacgaatgtcgcattacctgaataccgctcctatatggctgttgaaaccgaaaaaggagtcgtgctgtttacaaatacctcggaaggtctgcgacaacgcaaagcctatgaaaaatacctcgaactaaacttcttcaatccgtcacaaccgggcggcaaattccggtattgggaaatcattgccagtccgttcgacctgaaagacaaagtagattgcctctcaaacctcaattcgcagagcaaagatgatttattccacgaggcttatgtcgatcctgccatcctcaaacaagggcattcgatacgcgaattcgacctcacccagagttttgagaactataccattttctgcaaacgtaccgatccgaataaaacgccctataaagacttgggcgacatgacgctcaaagaactttatcaatttttcacatccatgcttcggggtaaagaaaagggagtagtttgtacggaaagtttgggatttccgagcaatccgcagaacaaaaccttcaaaataaagcgctaatggaatctgaatttaaaaaggacttgaatcctgcgccgaaatccaaacctgcaagactttgcatcacagtggataagttcttcaagcccgttcatatcaagatcatcagcaatgaactccgggactacaatagatactgccggaatgaagccgcggacgctcttttgcaccaaacgcccgatattctccagagaagagtcgtgagctttgaatttcaggacccgaaaatgattccgccgatttcaccggacaacaacgattcctatctaaagcagatacgagaaatgtctaagcatcctaacaaccacatatccataatgtatgataaatatcttagagatgatatcggacttttcatttctaaagttcctcggcaacatcttatatcccgctatggaatcgtacccgacagtccccatacaatcaacatcccggaactctatgacggtacaaacaaacccctcgtgcgggacgtacttctgcataataactttctggactgtgagcttatcgaaagcccacaaagcagttggctgtttacagataccgattcaggcattaaacagatgtccgcattctatgctcttctcaacaagcatttcttcgacccccgcatggacatcgatcggctcaccatctcaacagtatgggttgacagagacaatatgccgaggcaggcaaataaatttacagtggatgattcttcgaaagaccatctgttgttggcaaatgcgatcgaagcggaaaaaatcccgatccgggaaaagtctgttgaacatgattttagcccttatcccgaaaactactggagattcttcagtgaataccccaatgaccctcttaaccgcagtgacgaaatagcttggctactttttgcagaaagcacaggaattattgtcgagaaggacgaatatcacgattatagttatatcgaccggttcgagaatttaaaagagcgacagtataatacgagctatattgatgagaaaatggaaatagaaaagcagctcaagacccttgccggagaaattctccggcaagaaggattcgtaatacgcggcagggagctggaacccgctgtttcgatcgatgaaaacctcatcccggaaaaccggccttgcatacatttataattcataatccattgccatgaatcctaaaaacgaacaaccctccacagtattcatttcggtaaatcctcgttattcggccgatgccgtgcagatccttcataaaacatactgtgaagaggatttccgcgcattcatccataagtcctttccaacaccggaaaagaatcacaaaacactctccgacaactggatgttcgcttacgagtttcaagatggcggcaaactgccgcctttggctccgggtgccaaccacagcaattttttccgctgtatacacgacatagcatcccgcgagaatattaaacccgtcagcatcattcctctgcgggatgcctgttattgccataattatggcatcgatatgttttccgatgaggggcagcaccgcaatgtcattcagcaacccggttacaaatcaataagtacgcacttcgccatcttcggacaacgcggcgatatttttccgacatgccgggctgtagatattggttccggagttctcctctatgaccggaaaagcgtatccggggaggatgcttacaaaagttttatgcaattctgtgccgatcactatttcgatcccagcctgaacatcgatcgtatgaaaatatacgagctgcatacgttcctcgataagaaactgcttgaagaacattgtgcgaccctgaactttaatttcaactaccacggacgcgattttaccttccgcgatctgatgcaactgccgcttatcgactctgatattctacgggaaggactgccggcaaaagagtatgacatgcatcctacctccgaaaattactcgttgttcctcagtggtgaaaatgtcaatctccagccccatacgcataccttcgacatcgccatccttgaccagatacatcagaatggtttcccaagggaacgactatcatcggagtggcattttgtctgtcactatctggggaatttcaaggacttagccgatgaaattgtaatctgcgacgatccgaaaaaaatggactcgctgcaacaagaagccaaacatctggctcaggcattactcgacagggatttcccggagcgccggcaaatcacccaaaaccccgaacaaagtctgatgatcgagattccatccgaaaattttcaccaagggcccaaactctaattacatgactatggaaacacaaaaaaacagctattccgacctttatctgatgttaagcccaatttacgacacgctccacctgcggcgttgcaacttgggggacaaaggtttcgaagagttcgcactggagaatgtgcagcgtgcccatgaccaagcgctatttccgaataactggatgtttcattaccacttctccgaagagcaaatcccgcggataaaatccttggatggaatgcaccgcagagattttttccaaaaactccgccctgcattgttagaggaagggatcacccctttacatattcttcctttggacagagcattgtatctgcatatccattgcaaaccgctcctcgcatcctgccgagatattcccacacttgcacttagtgacctgttcgcgcgggacgggaatccggattttgaacttaaccttgcacggccgccgttccgggcatatacagccgtaaaaacctgtcagggagttcttttatttacccctacaccaaaaggagcccggctgctggaaggcttcatgcagaacatcgccgacaacttcttcttaccgcaaatgccggagacagagatcaccatatccaaactcccggcttttgactccgaattgcaggattttgccgatctctgtccgctttacaagccgtcattgacgcaacggcagaaggaaatgatccttgccccggcaattttcgaatcagaaaaaatcctcggcaatggtttggaatactttcatttagacatggctccgacatggagcaactatcacaaactggtgttcccgaacaataggacgggccttagctgcacccagcgcaatttcaatattatgcgcttattagcaatcgccgaaaccggacattttatatataaatttcagaatggcatgcctgaaactttcagctatagatcctctttcagtgatctggtaaaagaccgcacgcctcaatacacggaattagtgtcacgtcgtgccaaggaattgctcgatcgtgatttccccgacctacgcggccgcctggcagagcaaaaccaaatgcaacagcaagcgcaggataaactggacaggctctatgaaagcaggagcaaaggtcttaaattctaattctacaacgccatgttctccgattacgatacacccacacctgcatccgtctacttaatcattaatccggatcagaaagttgaatacctgcggttgttcgattgcggctggctgttctcattcatcgaacgagaggtcagtgcctaccgcctgtgcaaggatcgggatattcccgacaactggttgatggaataccggtttaaggatcaaagtctcatacccccgttttcaaacaccgacaacggcgactatctctcgcggttgctccccgtaacgaactcattgggtatctggccctcgaatgtagtgcggctgcgggatgccgtcttctgccataaaatgcacatagagcccctgagcgaacagggctcccatgacgtgttgctgaatcatccccattttacaagcagttcaaattactacgacgacaagttggtgaaagaagggaattaccagtttccctgctggaaagctctcgaaagcgaacgcggcgtattgttattcagtgaaaccgagaacgggaaactcgcattccggaaatattggcaatacctcaccgatcactttttcgacccgaagtttcacatcgaattcctcaatgaataccatgtacccaaattcatggacccgtatgccagccatgtagaccggttttatgatctgcgcataaaacggagcatcgaacgcgaatctatcacgcctataccccaagaattctttgccccgcgcgaactcgtgcgcacaggattctgccagcagcgtttcgatatgactcccaccggcaaaaactatgaactctttgccgttggaatgcatatctacaaggagatcaaagtaacgttggataattaccgccttgcatcgttactgcacctctgtgaatgtggggagcctattcatcatctctcacctgaaaaacatcagcaatgtccctatgaagcggacctcaatgcaatccgcgaaaaattctacaacaagccgtccgaagagcaagagaaagcctaccgagaatatggcgagaagcatctgaaagaggaattccctttgtattggcaaaagatcgcagaacaccaaaccccggaacaggaaaaggccacaactcccaaaattaaaatttagccatgaatagccccaaagaacaggattgcgtccttcttaccctcacaaaggataacaaaattgaacgtgtacggcattgcacccactcggatgataaactccgggattatttcgatgccatcatcgcaaaattcaagaatgacttctatgcaatgaaggatatctgggtgttgaaaatggttttcacagataaatcccgcatcccggacattgcgataatggaccaatatgaaaccctgcagaaacttctgcgcaacccccagctatatggtataaaagagcataaagccttcctcgtacatgatctcgatttttgcagccttcatggtttcgacccgctatcctacgagggtgcgcacgaaaaaatagcgaaaaggattggtgtttatgcgtatacggacgatttccgggcaatacgcacagaccgcggcgtgcatgttttcacttccgatgaaaccggggaccacgccatcgagaactgtttgagttattacgaagggcatttcttctcgacaaaaagaggaacagaccgcttcgatctcatcaccgtgcggcctatcgaccagatacctcaaggtattttgaatccttttgcagatacggtagattggaacacagcgcccctcgatttgcccgacgacttcttctgtaaaggcgtgaccatgctggaacttaccgagaagaaaatcgatatgctccccacggtcagcaactattggagcttctcgcatgaaaatgaaatttccgatatttcaagttcaaccgacgtatacgattattgctgcctgatcggtatctgcgaaggagatattcaacgacccgatatgatcgaaggcgaatggtatgaatccttttcattagagaaccgattcgatgatctgctcgaagaactggatgattgtgacgacaacatcgaaagagagaatgtcagctcccgaatcaagaaactggccgcgaagatcctcacggaagaattcgccgacttccgctattgccgggaaccggagaaaatcgaagaacaactccagcagattcaaacgcccgaaacggaggatttccaagagaacagcaataaacccaagatgaaaatctaacaaacaacaaaccgttatggataaacaaagtaatccctgcagcctgtatctttcgcttttacccgaaaacgagattaaaaatgtctacatctcggattccgacgaagagggattcaggcaatacctcactgaacaggtgcagaaatttgatgacagttcatgtgctattcctgatatatggctcgtgcaaatcaatttcgagaatcgccgtaaagtggaaagagcgacctcgaaaattgaaggtattatcagatcggaacttgaacagcagaaggggaaaatcatgcacgtaatttctttgatggatgcctattactgctacctaaaacatatcaacccgcttttggaggaaaacaaatatgccaacatcgtaaaaaccgaaggctatttcttattgatgatctcctcaaaaacccaatatatgcatgagcattccttaatgggaatccgaacggaccggggtgtacatgttttctctccggacagaaaaggaatgaaggcaatgaatgcttgccttcattattatgaaaaacattttttctgtcgtgaacatgctacggaccggcttgaagtcatttatatcaaggcgatcggagaaatgccggctccctgcggcaatcttttcggagaaaacaacaatttggagacaacgccactgcatcttccccagaactatttctgccatgacaaatcgctggtggaaattacaacctcaaaattcgatatgcatccgacgatgcagaactactccatattctgcacgaagaacgggattgaccccatgaaaacctccaccccgaattttgaatttttatgcctggctcaaattcgtgatggctattctcaccatctggcaagtcttttccccgaatggcccgacaacactgcattcggaaccgatttcctcgacttgtttttaaaatatggcaagtgtaaagacaatacccaactgagaataatccaaaaagaaatcaaggactttgccaaccggcttatcaatgaaaaataccccgacaaaatttgctgccgggaacccgtacaaacccaagaatatcttcccgacgacacacccgaacaatcaacgagtccgaaactgaaaatatagaatccaaattgtcacagctatggtgcaacacattaaagcaaatgaaccagcgagtctgctgctgaccctgacaccctataaaacggcaatacatgcccgaattacctcagaccccgaaaaggatttcccggccttcatcaactccgatattcaacatatcggggacgatccccgcacagtccccggatactggttcctgcacgtcgattacaaacacaagaaggatatacctgaactcagttcgactgacctgctgccaaaagtcatacaagccctttcacggaaagttgcggttataaagagcggagtgcccatgatcgacgtattcttctgccgaaaacaggacctcgacgcccttgcaccggaaaacaggcacgagataattgcacaagatttcagatacgatgtaatggttaatgaacacacccggaacagcgacgtgaaattgaatcttttccaaggaatccgcaccgatcgaggactccaccttttctcgcagaacgccaacggacaagaaggcatccgtaacttcctgcactattacggcaacaactttttcaataaacaacggccttgcaatagtttggaaattgttaccgtatacccgctgggaaatcccccgaccatcggcaaggagataagcaaaatggaaatacataaatatttgccctccaaactgccgaaagtcatcttctgcaaagaccccgcactgatctgcatcaccgaacactggttcgacatgcggcctacactcagcaaccaacgaaaaataatgacccaaaacgacctttcctatcttcaaaccaatacccgcgtccatgatttcatgtgtctggcgtacttgcatgagggaatttgcacccacacaagggagttgccgaaagataatatcaatgagttttcccatcaggaccgcttctgttccatgatgcaagagctggatgccgcccaaggcacaccccgaaccgaagagatcggtaagtgggtgcgggaacttgcgggcagaattctcaaaaaagactttaaggacctgcattaccgccgggaacccgcacgggccgaaacacaagaacatctcatctccaatcccgatgacacacccgaactatcagcctatccgaaactgaaaatgtaaaatacgaatttaaccgtatgctgcaactccaatctcgaagaataaaaagctgtcacaggggagaggaccgtagatgtcgttgattatttccctgaccgtaaataaaaaaggcagcgattcgctgccttttcattattagccaattcaaggaaaagttatttgaaataattactcaaccgtaacaggatcactaagaggattactatgttagggaaataattgtattcccatgcctccattaatccatgagcaacccggttccgcaggttgtgtccttttaaagtcagtacatacttcagtaataacctatcttcttccctgaacccggtcgccctctccggggtatcttttaaatcgctcaagagatcatccaatagtttttccatcattaattgtacgccggctttttctcggggcttcatggtgggaatacctattctttcgcagtacagacgtaatatggattcgattttaagagttaaggtgtcggtgacagtaatatagtcgaattcataattatccgattccttcatggttgcttccaattcgctgaagaatagctttaaaccggggcgcaacacatccaaaacccggacctcaatatgctgtccattataggtgcgaggaactggaacattaaaccaggtgttttcaagatacctcagcaaagagtcataagataatttgccggctttatagacttcaaggataaattgatgcaggtttcgcatgcctatctggtgtgcaaacccatactcctcccagaaaaacatctccttaatttcctcatcggtaatatattgatccacagtattcccgaacttatcttttattaccgtagtcgctaaaaaaggtacgaggcttcctcgctggtttacttccgcttgggctttaatttgcgctatatctgtaaaccaactcgcgtcggtgagttccgaaaggataccgttctcgtcggatgtcgcaattatttcatttatcattttcgtgacgtattttaaatattcaggcgggaattctttgaaaaattgggtatttagcgtgatctgactccgcgtagccatgtaagcggcttccatttgtgcaactttctccgcagattgcgcaattttatataaccgtaaggctttctcgatgaacgtgagacatacaaattcctcgtctctttcacctgccattttctcataaagctgagctttatagtaaatcaggtccttagaatcggcattctgcttggttctaatctttatacagcgatctacgatgtatattgctccccaagtatatgttttttcgagttcatgcgccgcactcaagtttttctctactacatggttgaaatccaccttgtccttgaataaggaataattatcggccatcaaacctgaaagatcaagcattccccggagtgaatctcctcggtgaatatcccagctatcatggtggtcgatgatttccgcacacaacacatcgagttctgccgtgagcttcgctcgctggaaaatattgaaggctaatgtcagaatcctaaaataatgctggaaattgtggttgtgttctccgccctctaaagatttatcccagtatattttcgccaactcggataatttaagccctaattcggacttgaaatcgttccttttggaataaggagtagcatgcccaaaatacaccaacagaccgtactccgttttaggaaagaggctgtggcatgccttatagcgatcttcgtagtattcgaaatcatccggtttcaaattcctcacatcaggctcatagatgtctatttcttctccggccgcatttcgacttgtgccggctctcatccaagataacccgaaaaccgttcccatggcaggatcgtccttattatcgaacgatttgcggatgcaaaaagccatacactctcgggccgcggtattatagtccgggtggctggaatcaagatgtggtagcaatgcaagaacatcatcgcttgttatcccttcaaattccgggctgtcaatttttgcataataatcaggtagggtttccattgtttttgtatttggatttgaatacaagttacaaaaaatatcggaatgtactatcagaaaaagggtggaaaattcaatcctctgttatactatagggcacatcgggactgatagcggttctcgctgtcgttgaggtgagtttataccgaaaaaagaccggccgtcgtcgggtttcggacggtcgtgagtttccggacggtcgtgagtttccggacggtcgtaaaatataagggagaagggagagagggggtccgcatgtcctctggtttcgtgcacaaaaataaagcacgggccgcgacgcgcaaggttatatgaatttcgacaaaaaaaatgcaccgcaggggtgcatttttttgccgaaaaccttgcgcgtggctcttccccgtgctttaaaagacgtgcacaaaccagaagacatgcttcctggggaaataatattaaaatattataaatcttatgattatgtataaatatatcaaaataatcttgttgctgattatagcaattatagcagtattatactggcaaaccctgcttcgaatagtaggatggcttatcatcttgaattgtatcatccgattcttcctgcgggtgttgggagtacttgctcccatcgttgtgccgatcgctgttctgtacttattgtttcattaaaaattataaccatgaaaaacggatgggattctaatcgctgggacgaagactgggatgaaccttataaaacgccggaagagcgtttacgcgaccatgcagcacgaagcatggacgaagatcctttgttgggatatggcctcggcccttatcaggataacatacaggaagctgcaacggatgaagaaatagagttcagccgggaacgtagaatttcccgcggccgataccgccgctcaacctataaggtgttcaccaaagaggaagctcgcaacctcggacttatcaaatagtaatctcaaacccctgccggcccggcagaaagaaagggctattattatggatcaattcaaatatcaagaaggactcaacgaagtcgtaaccaacaaagttcatcgcatgatcgacaaccaccagccggttgtaatgcagaccgtcgaaagactgctccgggaagctgaaatctcaagggatttcatcgtcccgatcggtgtcgaacaacgcggaacgtgcgagaatccgatcatctccttcgaaggggatgacaaacttatgatgcgcaaacgcggagagccgttcacactgcataacaacgccgtgcgtcagctcgccgagaaaatggacatcccctcgaaatacctccgagagctttcagaaggaagcgcatggcagcgacagcttgcggctgaaatcctgaacaaaacttcgggctggacaccccgaacacgggtgatgatccggaccgtaggcgatcaggtgcggggcgtgctttccgacagctaccgaagactcaacagcgaaattatcctcaccgcatttatgaaaaccgctcttaatgaaggagccgtggcttgcgacgccctgatgaccgacacgaaagtatggatcgagacaattcttcccgaacccatctgcatcccgacccgcctgaacggtacggtgattatttacatgggagtgcggttctccacctccgactacggcgacggatcgctcgacttgcggacattcctgctcaacggcgtctgtctcaacggcatggtccgcgaacgcaccctcaaacaagtccacttgggaggccgactccccgaagacctgcagctctcggaggaaacttaccggcaggacacgaaaacggtcctcctcacggtaagagatgctacccgacaactctacaacaaggatattatccgtaaaaaagcgctggagatagagagggccggagatacggcggtagatttcgaagccgaattgaagaaactggtgaagaacaacaaaatcctcaagaacgaggaagtggccatccagaaaatactcatggaccacaatcccgaagacggactgcagggaagcccgtcgctgctgaaccttacacaggcactcacggcttacggccggaaccagaactctgcccgcacccgggattttgcggaaatagccggagaactgatggaccgcgtaaaacagtaattccacacatcgatattcacatacagcctgcggcctccaaagaaacgtggaatccgcaggcttaatagtattccattatgaataaaaagtttaaacactacgacatcgaactgagaaagaatagcaaggaattcatcgctatggaaagccttttatccgagttgaattcttatggctttcatacggataacttccttgctgccctgagcgtggaacatcacacgacacagcagacgttcttccgtctgatccaaagtatcatactctatatggccgaaccggataacgtttgtatcgacgaccgcaaccgcgccagctacgagatgtgcaggaagatcgcagataccgtgcgggaatgccacctgccccatatttaaacctatcaacgactatgacacaggaaactaaagatatgatcgtattgctgcagctcgaattcagcgccgaaatcgaacaggcagaccatgacccgaaatactcctatcggattttccagcggaaaacgggtaatcccatctatcaggcgtgtcgcttcagcgatatgttccgttttttcaatatcggtccgtcgatgaaaattgaagatattgatattcgtatccaatggggccggaagatcgtcatgcccgccatgatcgacacgccccggatacgggaacgatcgcgcctgaaactcgtaaggttttatatcgaatccggatacggtccggaggggattgcacagtacaagaatcaactctttgaaacggaaatccgaaagatattctcagacctcggatttgaaatcacaaggaaaactccagaatacagcttatccgcaacaaagggccacacaaatctttactgccatcccacacatatcatgggcctttgcgacgccagctcgattgagacgataaggcagaacctctcagcgtctcaaacattcattcttacgtcatcagaaacgatccatgaaatctacgacatcaccccggaacaggaaatgaaatactatcatcagttttttaatggatttgtccatctggtgctgatcggaatattcaggaccaaacgccgtaatctctacaaaagtaaagacatgatgtacgacattggacgcaccataaagatccgtacattacgtgcagaacagggttataaatttggactccttgcggagaaattcgtggaggaaatctatcagaaaatggttgagaacggggtgctgatcgaatccccatgccatcgcaaatgccgtgcatccacctccaaagacaaaataaccgcaaaatcctaaatacatggaaaacgctgaattaacagtacacgaagaggaaggtgacttcttcaaaatatctctctccgaaaaagagactccccaagcattcaaacgtcgtgtcgaagaactcatgctgagcggtctttcagaaggggaagcccgtcacaacgccgcaacaacacctgtagctatggaactcttctacgactgtggccgcggtatgtttgctatagaatccgagcccctactgcacatcggaatcttcaatccctacaccgggtttgaaattcccaatgaaaacctgcccgcgtttccccggccaaaggaatcatcggtatccgcggacaaaatcccaatagtcccggtcccggtccatttgctcagcatactactcgattacatgtggcaggaggaaaaaaagagctgggaagaactggtctttgaacaaaacagaaccaaacccgatgaatacgaccctcatgctgtcacagggcatgttttccatataatgaaagagctgtccgaaatcctgctgctcgacacccggttctacagccagtccacccacctgacacggcgcatgctcgaagaacttccgtcgtcgcttcaagtccgggagatcggaaatgaccggatgcagcagattgcagaactggccgagcagtttacaaagataaaactccacatgccgcccggctcgcacctcgatatggaggatcaagacatcgccgaaatatggcgcgaagaacttatcgccattttacattcgcaggacatccctcagcattgaatacccactaacactttacgaagatggataacagcaaacaacagcaagtagcacaaacgaaccttcagtttgtcgcattcctgtgcggacagttgatggcgatcataaccaaactcctgcaacgggaaaaattcactccgggcgaagacctcgccatcaacaaggcttatgaggaaatcagccgagctaaaaaccgtttggaaaagattcccgaaaagtaacaccattaataccatatgtacgcggcgacaggcaaatgcttgccgccgattttgtttccctataattcctcacatcatgcaagacaaaacaccagacaacagcgatatgctcgctgtattcgaccaaatcgaggtcgatcaggagccggaaatcccaatggatgataaggcttattgcgaacgaatgcaagcccaatgtcatgccgcgctacgccatctgaaaacatggcatgaccgattccggtccgaagcggaaaagtactctgatcaatttgccatttcgtactctccgtccggatctgtagaaatcagcctcctcgtcagacaagacgaacaagaacaaaatgaattcaaggaatactatttctatcccttcaaaatcatcaacaatattgccgataactatcgacgcgcctgttatttcttcggtagtgttattatgaggtattttgaggaaaaatacagattctccatcctgcgtcccgactgtgaggatacgatctctgtgggcttccttcccgattacaagttatatgtggatcacatcatcagccgcctgaacggacaaacgttccgcgagaaggccgaagaggaaatcatcatccgctcgttattcgcttcaaaacgccgagagcgtggcacagcacccgaattacgggataataaaatcctcttctacgacatcgtggagatggacgactaccaacgcagcataggacgataccagattgcttacggcacagatacgtttgtaaacaatatatgcgcgggtttggtcctctatgctacccaaagtatacaaggtaatatcggctccatcccggaattcaaccaatacaacgtacaggtcggaaagtggtacgacatgaaaatggacaaaatcgaggccatcaggttctatgtaaacggccgtatcgatgtccgtttctcaacacccacagccgccgcagagtgcttccacttcctgcgcctctattcactcgcaaaccattgacatatgagttatcagatcaagaatcagacgatccccaaggaaaagcgggaagattacaacaagagaatcctgaaagccattgacaagaataaaggggaaataccccgggaaacgatcttcaactgctataccggcctcggaggtttgcacggcctcaaacaagccaatttcggaaattataacgactattctcaagccaagaaagaattcgagatggggcagttcttcacgcctcacgacctttgccgccagattgtcgaaatagcagctcccgaagcaacagaaagcattctggatatgtgctgcggcatgggcaacttcttcaactatctgcccaatccctacaatgcctacggtttcgacatcgatcccaacgccgtgaaagtggccaaatatctctatcccgacgccaacatccaaactcaggacatccggtgtttcgaccccgatcagcgcttcgatattatccttggaaacccgccttacaacctcgattttgacagggagccgtcgcagttttacttctgtgaaaaagcatacaacgcactcaatcctgccggaatattcattctcgtcgtgcccatgacctttatgaaaagtgaattctgggacaagtcgcagatcggggctattgatcgaagattctcattcatcgggcaaacacaactccctgtatcgaccttcagttcattggatgttgaaaacttcgctaccaaaatcatggttttcactcgcagaacggaacatatcgagagaaattcatacaaggatgatgaatttgtatctatggaatgcctgaaacagcgcgttgcggactttcggaagctccgacaaccgctaaaactcaaattgctgcgcgaaacaaacgaactgctctattccgaagaccttgcatttcaagtgaaactcaaaaaatatctgtatgaactcaaagcacatcctcatatgcagggaaaatatgaaaaggcgctggcgcttgtaacgaaattccgcaatcagaaacctccccagaactacacccggacccaatacgacgaatttcaaaaaaagaaactcacccatgccaaggtgttggcagtaatctatcgttacatccggcggcaatatgtagtgccacgcaaagaagtggcactcgtgaagaccaactacacatacaaactcaaagcatacgccccgcacatgctggataatgtcgaatgcaaagaggcccccatataccagctaaccttgaacgacggcgggctgcccacacccgtaaaggacatgtccccaaacgcggcggcacagtatgcacaggccatgcgggtaatccaccgcaaacatcgccaatacctgcgacacagcacacctatactcgatgtggaacccaacaaagctcttgccaagcatatcgcggggttgcgcttcttcaacaactacatggaagtttgccagttcaacgacctgcagcaacatgatatgaacctgattttccaaagacgctattcactcttgaactggcagcagggatcaggaaaaaccgccgtagcgtactattacggcaaatacctgcgatctctgggccgcatacgcaacagcgtcgtactggccccggcgattgcgattaaaatgacatggaaaccgtttcttatcaaacacaagaaacggtttgtaatcctgacatgcgaagaggatttcaaaaagattcgccccggtatgttcattctcatttcgaccaccatgctcgaaaaaaacaaaaggtcggtgaaactattcatgcgagggatttcccgcaaagtctgcctgatcttcgacgagtcagacgaaatcaccaacgacgaaacgcagcgtacacgcaactcgctcgatgtattccgccgctgcaaatacaaattactcgccaccggcacgacgacccgcaacaacgtagccgaactctacggacagttcgaaatactctataacaactccgtgaacttcatgtgctggtgcaagaaagtgtatatcgaggatcggatcacgcatgacattttctgcgaagataacaccaacgtcggaaaaccgttcccgccacgagaaggagcccgcctcttcaaaaactgtttctgtccgggaaaagtcaccgtcttcggaattgagaaacggaatcaggatatttacaacaaatatgaactcgccgagttgattaagaaaacaatcctgacccggaaattcaaagagtttgcggccgacaaatatgagatcaggcatcatgccgtaatccccggaccgggagagaaggcagtatacgccaagatactgaaagaattttgcgaaatatgctccttctatttcacaagcaccggcgatgcgaagaaagatgcagcattgcgcttagtccgtcaaatcatgctaatgattcgcgcatgctccacacccaacacattagccggttacgatggggaacctttccccagaaaaactcgctacatcgctaacctgataaaaacagagattccaacaaaagttgctgtcggctgcacgacaatcgaagcaatgaatatgtataccgattatctgggactcatgtttccggaaagaccgctgttcacaattcacggagaaataagtttcgagcgccgccaaaagattattgcccagtttgaagaaacagcagacggtattctcgtatgtacacaacaagctctcaaaagttcgaccaatattccatcctgcgatgacgtgatactcgaatccctgcaatggaatatccccaagatggagcaattctacttccgcttcatccgcatggattccagaaataagacgcgcgtacactatgtctgctacgatgaatccatcgaacaaaatctcatcgccctgatcctgactaaagagcggctcaatgaattcattaaagtcggcgaaatcatggaggaatccgaaatcttcgacgaattcgacgtatcaacaaacctgattgaaaacctgctcaaacgagaacgggataaagacggtaatttctatatctcatggggtaatcagaaggttgcataacaattaaaactacatcattatgacaagacaagaatatttaaaccgccctttaatcaaagatgtaattactatggataaactcatagaaaatatctgctcggcatgccattgcggtaaatgcaaggcacaaagatacctcgattcggaaatacagaacctccgggaactacgtgacacgggcgaactgcgctatgacgatcttgaagctgcctgctcaaacttaggggtagatttcgattgcacggaatatttcgccaccgcattatcgctgagttgaccacaaagccatgtttgggcgggagatcagttgcccgggcaaactaaacttcctgatatatattaacctgtaaccccgaatttatcaaaccgcaaataccactatacatgaatatcacaagtatgcaacttatggcaggtgtgaccgaattggaagctacgctcggaactgccacgcctgaacaacgagccatcatcggcaatctcaaaaagcagatacgcgagaatggcctttttttcgaggtcacctctgcatctcttactgttgaatctatgcgggagcatggttatgacgtgaccgacgaggatgccggcatcctgtctaaaatcgctgggcatgtcgaagtcgacgccgatatgctatggaatgccgtagaaatatgggcccgcgaatacaatgtcaaatcaatcaaagaagaggaggaatagttatgccagttagtgtagcgataagtcgggaacctgcgaatcgatctgcattgtccccgcatcgggatatggtcctccataacacacaatgaattatcttgattttttccgactaaatgaacaccaagtttaaaaatcgattatctttagccattattatataaaaaattcattacaaaatgtaaaaatcatgtcaaacgaaactatttccaatttagaccttaaagcaatttatttagaaaccgaggcaggtgatatttacggtcttttttctgaatatcgcttaaaagatgctgttttgccgaagggcctcattgcttatggagtaaggcactctgacgacgatgattctgtccccagcactatcgaaccatcggcaacggtaaattactttggctcgctcatagtagatagaccccttgatttccgcggaaaagaccatatagacattaccgaatggggattcgatgaggacgaagaactttcagattcgctcaaacagtatcttgacaaataataactgcagacatttataaagaagccgcccaagggcggctttgttgtattcgcatcaaccctaattctggtgaaatgtggcaatcgaccgcggcggagtggtgaaaaacatataacaaaaataaaacatgaacgaacagtcaaacacctaccgagtttacgactcaatgggacgagctacggatgttgtttattgtgccagtaatatgaaacaagcgtatgcgcttttcaaggctgatgttaaaaattatcaacgctttttcaatggtcatttaaagcggacttacaatggaggcgcaaaaggataatcgcgacatatgggaagcatccccagaatccagccaaactcatcgaaccttttgtcggtgtagccaaaaagcaggccccgttcctatcccttttcgatgtgactcttttttaaataagataacacaggcacggtcaaaatggccgtgcttttcatatttacctaaaaaatacaattatgtcaacaagaagcgaaagaaaacaaaacagaattgaccgctacaacgaactggctcgtaaagcggaaacaaagtcgatcgaagcgttcgaacattcgaacagtatcgtgaaatgtatccctatgggccaaccgattctggtaggacaccattctgagaaaagacatcgcagggatttggacaaaagctggaatgctatggggaaatcagttcaggaaagcgagaaagcagaatattatcgcaaaaaagcagaggccgcagaaaacaacaatgcgatctataccgaagacgaagactccgtagaacggctggaggaaaagatcgcacggctcgaaaaattgcaacaggcgatgaaagatcggaacaaaatcgtgagggacaagaaactcacggaggaagaaaagatcgccaagctcattgaaaccggaatgacggaaaaagcggctcaaggtctaatcgtccccgatgtatgtaatgacatcggctatgctgcgtgctatctgacaaacaacagtgcgactatccgcaatgcaaaaaaacgcctcgaaagagtcaaaagactcaaatcccaagaagagaagacatacgaagtgaacggaatccgcgttgtcgagaatccccaggaaaaccgcttccaaatattcttcgtgaagaaacctgcagaagaaattcgccaaaagctacaacatgtaggttatcggtattcctacggaaatggttgctggcagtgttacttgaaaagatggaatatcgaggccggaaaacagatactcatgtctctcggcaatgactaaaatatattctatccctgttagcctaaatagcgtaatcaacaaggttgctgtttgttgatgaatttttgatgtacggatatgtaatgtgctgatatactatgcatatgacaatcaatatttataagttgagtgagtaattgaggatataaaggcttgtcagtaatggcaggcctttcattttatggggtacttgaatcaagtaaaacagtaatccccaatctaggataatcatatatataattcaatcttgattttcagaaacttttaaccgaaatttacatctgcaacaacctaaaaaagaggcatacacctgcttgtgatttcaaatattttgtaactttgcaaagctacttcggtagcaacatatttgaacacagaaagtgtttagtttattctcgctggtgaacctaggaaattcattgagacaagggaatgagctgacctcttccacattgtatataactgtcattctagcagattatataggtgtggggttgttgcttatttattgtcacggctattcctagggcctaccagctaaaataagtctaacagctccacgctttctttttataatcacccgaatcggagttgggcgggaatagttctaaaactatgactactaatttaaatgagaacctgactgtgataagccaacaaccgtttgcattcacattaatcaatttattaaaagataaaggagtaataacaactgggataacgattccatttataataggtgcatataaaattgcaaaacatgattcaatagaagtaaatctaaaatttatacaggaggtatttgctgatattgtagcaacagccaaggatacaaaattttttatatgcacgtgtaaccatattaatcaacatgtaattacaattttgacacaagaggatacagatgtgaccggacattattctacgtatcagcatatcaaaaatagtgatggcgtccctgtcctttattttgaagaaaattttgatatcgcttatccttcattagataagataagtcaattttattggctgaaatatgaacatatcctcaaggaacaagtttattcatatcaatcaactgaaaataaatggattaaattctctgatacagaactaggatgtattatatctgcattttcatcttgtgaagaggctaaagaaatcattcgaccacgcatttctaaaaatgttgctaggatatattatttttggtgtgtcctcaatattctactgttacttcgtggattagcttacggagatgattttgatcgtcaaattaaacgttggtttccttttgaaggcgatttagactgttatgatattagtgaatttattctttattgtgccataatccccctcgtgttacgttggatttataaaggatggaaaaaagtcgaatgtaaatactataaagactaattaaaatagattagttctaactcactcgaatagaaccgggatagaattactgaaataataatgcaactgattaactgtatgctatggcagttcttcgattttattgtctggcttgcggttacaccgattgctgtgtaggtcatcgttgggaagatgaaacgccattagccaaatttacatcctttacttgtaaagattgcaaacgcttatgcgataatcgttatctgaaaggtcagcccaataccttgatatatgcttcaactgggcagatatattgggaatacatacccgatgaacctttttgtatgtggtgtggttcaaagaatgtcgaggagtggagcgaagataatccggtgtgtcctaaatgtgaaggggtaatgaagaaattatgagtatacgacagatttataagtggataatattaagaattaaaaaacggcataaggaatattctgaatgttttttaatccttgacggtgattggctaaataatcttacagataaagagatatagtattaccatgtacaatttactcacttacttgtatatagaataataaagtaagtgagtataaagggttgctgtcaaacatccattcagcccgttattataataggggtttactcattcagattaattattttatatagaaatttatgtttgagtgagtaacctaacttttgtccgggctttttctcctgcaatatgagaatcaagtaactacggctattaaaatgatataaccgaatatcctctgtccccacatgcgaatcggctcaagtaccacccatcatacgatgaattcttgtggttacttgagtcgaattcattattttctgcaataaaaatttttctgaaaggctgaaaatgtatgcccgtgcgatatatcccccgaataccccctcccgccttgcgggattgggttccgaccccagctgggctttggggcatatcatattattgcccatgttgtcgaatcttataaatctatgactatgaaccacacgctcaaattcctgcggacattcaccctcgacgagttcaaggagtggaaaggcatccttcaaatccgcatcatccgcaacgagcagacgggcaagcatttcttcgggtatggcgataaggcgggcgctgtcacgtcgaagtatcccgccgaagcgctcgaccatcccgtcatttcggaagttctctccgaggagagcggcgagcagttcctcctgcttcacaatgcaggcgacaatcctcagttcaccacggttgccgtactgtaagaatcgtcctcttcatttaaaaggctgttcccctcaaaaggagcagccttgctttttatcaccgtactataatcattcccatatcaaataaccatttatctatgcaattacgacattcacaacgccgggcagccaagatgcggctggccctgcaaggggcatcgggttcgggcaagacctattccagcctgctgctggcctgcggtatggcttccgactggactaaaatcgccgttatcgacaccgagaacggcagtgcagacctctatgcccatctgggagcctacaacgtactctccctctcggaaccctacaacccggagaaatacatcgatgccatcggtatctgcgaaagcgcaggcatggaagtaatcatcatcgacagtatctcgcattgctgggattacctgctggatttccacgccaatctgcaaggcaactcctttgccaactgggccaaggtcacgccgcgtcagaacgcctttatccagcgtatcctcaattcctcgtgccatgtcatctgtaccatgcgcagcaagcaggagtacgtactcaacgagcgtaacgggaagatgattccggagaaagtagggttgaaggccgtgcagcgtgacaacgtggactatgagtttaccatcgtcttcgacgtgaacatgaagcactatgccacggcatccaaagaccgtacggaactgttcgccgggaaacccgaatttcccattaccagccaagtcgggacacggattctcgactggtgcaaccaatgtcaaaccccaacccctgtaagctatggaagcagctatccggcgggcaatacagcccgataaccaaccccacccgctgccctttgtgcccgttgaagatgcgaaggacgatatgcagccgattatttcctcgccctcgttcggtgaggatgaagaatccccgtttcgggaaactcccgaagaacagccacgcaagcctttcatcgaggccaataccaaacaggtcagcctttaccacctcaagaacgactgtattaccccggtattctccaaagacaacgaggtgaccatctcccataaccaattcatcgaaaccatgtgggagtgtgcgcagcggatgttcagaggagatacggtagacaatcccgaaatccgggtgagccatatcgtcaagggccggactcccgaagccatccacaaggcggtacacgaacttacggatgcagacaagacgatttattacgagcggatgatgttctgcatcgaaattccctctgtcacggaaaccattgacggatgcaggctgaaccttacgatagggggtgtcagagcctataaccaagagaacctgtatagcaagaaaggcttcgagaagttcaaggtctttatcggcttcaaaaacatggtgtgctgcaatatgtgtgtggctacggacggtgtggccgaagagatacgggtgacaaatacgcaagagttgacggcgaagattaccgaactggtggtaagctacaatgccaaacgccatctggagcggatgcgggcattgctcgacagtacgatgtcggagagtcagttcgcacagctggtaggcaaggcgaggttataccagttcctgccaccggcacagcggaaactgctcccggagttcgagttcacggactgccatctgaacaccattgcaagggcctattacaacgaccctgcatttgcctgcgacaagcaaggagagatagacctatggcgagtgttcaacctctttactggagccaacaagtcgagttatatcgattcgttcctaacgaggagccgcaatgctatggtatttgcagacggactggcaaaggcgctggcgggagagaaggagtacagttggtttgtggaatgaaacaacgcaatatctatggtacgaattctatacaaaatattcttcgggtatctgctgaaatggtggatttaatcagttcaaatattgaataaacaatacttgttggaatactttttagcagagaagctagtataattcattgaaatataggcttaaacattccgagttcgagtcctcctcccgctaccaaaggggtcggattgaaaaatccgacccctgtttttttgtaaaccgacggcgaataatgcaggctgacggcgatctacaaaccgtgcgccttgataatcctccggaacatgcttttcacgacgagcgtgtggaacgggcggatcaggttgaaatagaagaatcccagccggttgtggtatcggaccaaggtgctcaggtggatttcgcgcgcttcggcgtaaaccgagaggtaggctttcaggtgtttgtcgtcgagtgaaattaccgtttcattgtcggttttgccgacgaccgacatcatgcggtaatccctgccgctgcggattgccttttccagctgtttcgcatcgccgttgtcggtttgcagtccgaacggtctgaccagcgcgttgcgcagtttgaacagcgtgtttagccatccgggcatcgtcgtccagaatgccgtcatcaggtcgtcgggcgagattttgcgccggcaggtcatgccgtatgtgaagcagtcgtggtaatcacccggcagacagggtgtcagcagcgaccggggcggaatgtctgtcttgtgaattttcatgtcgttgtgtcgaagttgcgtttggtttcaacaagatatgcaaaaaaacggaacgaaccgccgtcgggtcgcaaactccggcgcgtaatttgccgggtagcgtataacgtcaaattccaaaagttatgaaagaggatacgaaaacgacctgcacgccttgcgagcagaatttcgaacgcaaggtcgatgagctggtgaaggagggcaaggccccgaccgccagagagcgtgaagagaaggaagccgaagtggaagcggctttctccgaccgcgggaaagagaaaaagtaacgccgtcgggtgtgtatgcaaagagcctgctacttgtgaggagcaggctcttttatgcgtatgtccgtgttattgctgcttcttgtaggcttcgacgccgctacgcaggaactgcacgaagttttcgacgttgaggtcgtatccgcgcggcggcacgagcgttttcccgtcgcggccctgcagtacgtagtagggctgggcgttgacgccgtaggttttcagcgcatagtaggagttgatcttgccgagacttttgagcactttgcccgaatcggcggtcacccattcgttttcgggcaggactttcttgtcgtcggagtagagcgccgcgatcacgtaatcccggcgcaggatatccagcacctgcggatcggaccaaacgcgggcttccatttcgcggcagtttacgcagccgtggcccgtgaagtcgatgaacagcggcttgtcgactttcgcggcgtatgcttcggcctcctgcaggtcgaagaatccttcgagtccgtgcggcaggtgcaggaagtcgctgtgcttgggttttttgccgtctgcggtcagcagcatgcccggttcgcccgacgctgcggctgagccgacctgtccgatgacgaagtcctgcgtatgcaggggcggcaggtagcccgaaagtcccttgaggggcgcaccccacatgccgggaatcaggtatacgacgaacgagaaggtgatgatcgccagcgccagccgtcctacgccgaggtagggcatgtcgctgtcgtgcgcgaatttgatttttccgagcagatagagtcccagcagcgagaaggtcacgatccatacggccagatagatctcgcggtcgagcagtccccagtggtaggtctggtcggcgaccgaaaggaacttcatgccgagggcgacttcgatgaagcccagcacgaccttcaccgagttgagccagccgccgctcttgggcagtttcttgagcatcgaggggaagaaggcgaagatcgtaaacggcagggcgaatgccaccgagaatgcgagcatcgtgacgatcggactccagaattcgcccgaagtcgatttgatgagcaccgaaccgacgatcggtcccgtgcaggagaacgacaccagcacgagcgtcagggccatgaagaagatgccggccaagcctttagaatcggctttggcgtcggtcttgttcaccatccacgagggcatcgtgatctcgaaagccccgaagaacgaagcggcgaagaccatgaatacgaggaagaagaggatgttcgggagccagtgcgtcgccagccagttgaagatgtcggccgtcacggtgtcgccgcccagaatgcgtgtgatgacgatgatggccgcgatggggagcgtgtagagcgcgacgatgaagaatccgtacatggcggcacggaagcggccgcgtgcgggacctccttcgcccttcatgaagaacgaaacggtcatcggaaccatcgggaacacgcagggggtcagcagggctgcaaagccccagaggatggcttcgataatcagcgcccacagcgtgccgcctcctgcggcgttcttctgcgccgggacgatctccgcggcagctgtcggggccgtgccggaggccgtatccgcggcggcttccgccggggtgtctttggcggaggagtcgttattcggggagacggctgcagtactgttagctgctgccgagccgggacgtgcggtcagctcgaccgtcagttccgtgtcgtcggggggcatgcagctcgtgtcgtcgcagatcatccattcgattgcggccttgacggtggctttggccgcggcgagttttacttgctgggcgaagcgggccttgccggcgaaggtgccgatctccatctcgaatgtcttgtcgtaatggcgttccggcgtcgaaagctgttccacgccgccttcgagcgttacgccgtcgcccggcgtaaagacgatggccgtagcgttggggccgccttcgtagggtcccatgtcgtacatatggtagggggcgggaatcgacgcttcgagaacgatccggtagacatcgccttcgaggtgctccacggagcttttccagctgacgttctgagccgtggccgctgtgaaagcgaacagcgcggcaaccggcagtaaaagtgtgcgaaacagtttgtacatagtcgtggcgcgttataatttgtgcaaagataggtgttttttgcggataaattgctacattcgcacgatgattcgcctgtcgctcataatccccacgcacaataggtccgaacggcttatcgccgcgctcgaatcggtcatacggcaggatttgcccgccgccgactgggagtgcgtggtcgtgagcaacaactcgacggacgacaccgtcgcgcggttcggggattttgcggcccgttatcccggcctgaacctgcgcctcgtgacggaggacggtccgggcgtctcctatgcccgcaaccggggcattgccgagacttcggccccgctgctggttttcatcgacgacgacgagcgtatcaatccgggattcttgcgcgcctatgccgactttttcgatgcgcatcccgacgccgtcgtggccggcgggcgcattatcgccgagtatgtgacgggacgtcccgcgtggctctcgaaatataccgagatgccgatcgccaatccgatggatttcggcgacgccgtgcggccgtttcctgccggccgggttccgggcggcggcaacatggcgttccggcgttcggcggccttgcgctacgggggcttcgacccttcgctggggcgtgtcggacggatgttgatcgggggtgaggagaacgatttcttcgaacgcctgatgcgcggcggcgagacttgctggtatgtgcccggtgcggttatgtggcatatcattccgcccgaaaaactgaccgaatcctatttccgccgcctttgttacaacgtcggcgtgagccagcgtctgcgggcgggcatgtatcgccgctatccgaagacgcttctgttcgagagcctgaaatggggcgcgacgctgctgctgtcgcttacgatgccgccccgcaagtcgctttggctgatccggatgcgctatgagatcagccgggggcttctctccgatccgcaatgaaaaaccgcagtccggagactgcggttctgtctgtcttgcgatcttctttttagaaaagatacttttcgtttttgaccttgttcacgagccgggagatgtcctcccacgcttcttcgccgaacgtcgtgccgacgacctcgatgaccttacccgccgtgatggccccgatcgtgccgcactggcgcagcgaaagtccgtcgcagagtcccgaaaggaatcccgcggcgtagaagtcgcccgcgcccgtcgtgtccacgcgcttggctgcggccatgatgcctacatgcaccacttcgtcgccctgcttgatcatggcgcccttgatgccgattttcaccacggccagctcgcacatttcagaaattacctgcagggcgttcagcggttcggcttcgcaggtgaaggtcttggcttcgtcctcgttggcgaaaacgatgtccacgtagtcgcggaccagaccgcgcaggaattcgagattctcggccacgatgttgaagctggccagatcgacggcgactttcagcccgcactccttggccgtcttggcggctttgagaatcaggtcgtggttctgcaccagatagccctcgacgtaaagacagtcgtaatggtcgaaaatcgacgtttcgatctcttcggccgtcagttcgagcgcggcgcccagatgggtgaccatcgtgcgttcgccgtcgggcgagatgagcgacacgcatttgcccgaacgctccgtgccccggaagatgaccggttccacacccaagttttcgagcgcctgcacgaagaagtcgcccgtcgtatcctgtccgaccttgccgatgaacccgacatcgcagcccagtttggccatggcgcggatggtgttgcccgccgagccgcccagcgacagcgagtagggcagtcctgccacggatttcgaaatttcggtctgcagggtggtgtccacgaggctcatcgagcctttggcgagtttgaagcgactcagcaccgagtcggatttcagattgaccagcatgtccgtcagggcattgccgatgcctataacacgtttcattcggtaagttcgggattgcgttttggattatatggagagtatcttgaccagttcgaggtctttgcggtcgatgcccttgtcgtgcttcacggctttggcgaacgggacgtagacaatcttgccgttcatcgtgccgatcatcacgttgcgctgtccgtcgagaagcgcttcgatggcggcttcgcccatgcgcgaggcgaggatgcggtccacggccgtcggcgatccgccgcgctggatatggcccagaatcgtgacgcgcgcgtcgtactgcgggaactccttcttgacacgttcggccagcgccgtggcgccgcccgtcttcgggttctcggccacgatgacgatcgccgagttcttgctcttgcggaagccgtggttgatgagttcggccagctggtccacttcggtttccatttcgggtatgatcgccgcttcggaacccgtggcgatggcgctgttcatcgccagataacccgccgtgtggcccatcacctcgacgaagaagagccgctcgtggctcgacgccgtgtcgcggagtttatcgaccgcttcgacgatcgtattgagcgccgtgtcgtagccgatcgtcgagtcggtgccgcccagatcgttgtcgatggtgccgggaagtcccacgatcggcacgttgtattcctcggcgaagatgccggcgcccgtgagcgaaccgtcgccgccgatgaccaccagcgcgtcgatgccggccgccaccatgttgtcgtatgccgccttgcggccttcggtcgtggtgaattcctgactgcgggccgtcttgaggatcgtaccgcccaattggatgatgttgcttacgctttgggatttgaacgacacgatctcgttgaatacgagacctttgtatccgcgcatgatgcccttgacggcgaagccgttatagattgcgctgcgggttaccgcgcgtatggcggcgttcattcccggagcgtcgccgcccgaagtcagaataccgatacatttgattccagccatagtttttcgtttagaaaacaaaatcgctcaaaggtagtaattatttcaattttttcaaaaaacgagggcggttcccggaggatccgccccgcgtttcgaaaaaactttttattttacctaacgcctgtggcctttattcggtctgctctgcggggactcggccggcgtccggctgtcggaccgaatccggttctgcggattcggttttgtcgtctcccgtctgcactttcacccgtttgccgttggctttcacctccagtccggccttctccctgtcgatcgtaatgtcgatcgactggttcgggacgctgatatgcagcgttttgcggccgtcctcgatgacgttctggctgtcgtactcctccagcagccgctcgaccgtcgtggtgtcgttgtcgatgattatctcgctgttgagcatccgttcgataacgctgtgtctggtccggatacggtcgccgacgttctcgcggatggcgatacaggtgcaggcgatgatgccggcgagccacaacaggaagattaccagtatggtcttgcctccgggcttgcgcgaagcgatgaggcacatcagtacgtaaatgagcagtattaccagtatcagtacaataagtatgccgagcgcgggaacccacagcgtcatgcccagcgggaagaacggaatggagatgctggcgccgccgatgatgagcgcgaagagtccgataatcagcgcgcaggccgccatgatgagtccgaatacgagcactccggcgaagagcttgaggaggatgagcaccaccttgccgaataccgacacggcttcggcgacgatgggtttggccttggcgtcgggatcgcagctcgcgctggcttcggtggtttcgcggatcgactgcgccgtgatcttctcgccgttcatttcgagtttctggcgcgccgtgcggggagccggaacggcaaaccacatgatgatgtagcagatgacgaagatgccgaacaggttgcccatcatcggaccggtccagcgcatgaagggaatccactggaagacggtgagcagtatcggcaggaacatggccagccgtatccagaccggatcgacgtcgaaatacttgccgatgccggcgcagacgccgcccagcttggcgttttcggtgtcgcggtagagacggcgcgggatgcgcggctcttcggggcttcgtcccggctcctcttcggagatgtcctcggcggtccccatctgtcggatgatattcagaatcaggggcttttcgaccacgcgggtgctgtcctgcgccgagaggatcagctcggcgatgcgggcttcgatgtcggcgacgatctcggctccgtcgggagtctccttgtaggtctttttcaggctttcgagataggcttccagctcctgataagcgtcggtatccatcgtgaacgccacgcccgaaatgctgcatttcttaacctctttcatggttgctcggtttgggggttagttgcggccgacactgccgccgctcgacttgttgatgctggtctgacagtcgccgctgtagcggatcgaactgccgctcgatgcgtcggcgtgcagacgctccgtgcagtttacgacggctttcgccgcgctcgaagtgtttaccgagcactcggcggcgacgaagtctccggccgaaagtttcgcggccgagctgaggtcggcggtgcacttcgcggccgagcctttcagcgtgattttcgatgcgctcgaagcctccacgctgcaggagaccgcttctaccgaggcgttgattttcgatgcgctcgatgcggctacggcgcaggattgggccttgaccgaaacgtcgatcttggcggcgctcgatgcgtccatggcgaatttgtcggcgttcagcaccacgtcgcccgaaattttcgcggcgctcgatgcgtcgagggcgcggatgctgccgttggccggaaccgtcacggtgacgtcggcgttcgagaggttgtttatcgacttgtcgatcgtggccgtgagccggccgccgttggcttcgactacgacgtaatccataacgttgtcgtcggcggcgatggtgattttgccggaggtcttgtcggtgatgacgaccttgacggcgcgtgcggcgtcgatgcggtcgaaggccggagtctcgatggtgcgtgtgacgatgttgccgctgcctttgagccctttgccgaagaagacggacggcgctgcgatgcagacaaaatagaccgttacggagagcatggcgcccagcaggactgcgatcaggagtatctttttcatggttgtgattttttgaggttttttattgtttgccgtgacgaatgatgcggatctgtcctacgagttcgtcccatgcctcgtcgagcgtcgtgaggtattcgcgccccttttcggtgagcgtgtagtacttgcggggaggtccctgcggagactcttcccagcggtaggtcagaagccctgcgttcttctgccgcgtgaggatcgggtagagcgtaccctcgactacgatcatctcggcctgcttgagttcggcgatgatcttcggagcgtatgaatcttcgcgggagagaatggcgaggatgcagtactccagaattcctttgcgcatctgcgcttttacgttgtcttcggccattgtgctattcggttaatcgcttcggagccttcggcacgatcagccagaggatgatgtagacccagatcgaaaggccgccgaagagtatgaggatcagtgttgctatgcgtatgagcgatacgtcgagaccgaagaattcggccagtccgccgcagacgcctgcgatgatgccgtcgggagtgcgcagcagtctcttggtgttgttcgttgtcatggttttatcggtttttgttgtgaatgctgaatttgcgtgcgggttcttccggaatgacgatccagagaatgatgtaggcccagatcgagagtccgccgaaaagtatcaggaacagggtgatcaggcgcaggacggtcgtatcgacatggaagaattcggccagtccgccgcagatgccggcgatcgaacggtccgtgcgcgagcggaacagtttacggggttccggttcgggctgttcctcctgcggggcgctgccgcggcgttcgccgaagtcggcgggcgatcccatgcggttcatggtctggcggaccgtgtcgagggtgatgacccgcatcggcgacgaaacgatctcgcggaaaatctcggcgatgcgcgcttcgatgtcgcccatggtctcggtgtcgtattcgggcaggcggctgcggatatcttcgagatagtttctcagtacgcggtaggcgtcttcgtcgagcgtgaaggcttgcgaaccgatgtttacgtttactgtctctttcatagtcgtagaagctgatttagggttaatgtgtccgggttactgctactttggtactgcaaatataatacagtttttagtattatgcaatgcaaagtactttttttcttaaaaaatgcgattttttttcggatacctataatatagaatcaccggttgctgcggaagaaaggaggtgttgcaggaaaaaattgcgatatttgatgatccgatgttgcgtttcgcccgtcggtttcgtcttacagatacaatggaggaattcgaattcacccgatatgtcgtcccgctgcgcgatcgtatgttccgctacgcgcagagtctgctgctctgcgccgacgaggcggaagacgtgacgcacgacctgttggagcggttgtggcgggagcgtgatcggctcgacggctgccgcgacgtcgcttccttcgtgatggtcgcggtgcgtaactgctgttacgaccggttccgcagccggcaggccggcgagcggcgcgacaatgcggtcgcggggtgggccgaacgttcgacgacgggcgatgcggagggctgggaggcgcgcgatctggtgcgacgcgcgatggcctgcctgcccgaacggcagcgcgaggtgctccacctgaaggatatcgaggggtatccgacccgcgaaatcgccgagatagcggcgtgcgacgaagcgcaggtgcgcgtgattctctcccgcgcccgcaacggactgagagaggtactgaaaaaaatgatggacgatgaaagagcaggacgaaagaattgagcggctgctggagcgctatttcgatgcgcggacgaccgaagccgaagagcgcgaactgcgcgactatttccggtacgtggatgagattcccgcatccctgcgttatgcgcggacgatgttcggcggattggacgctctggccgaagagcggtatcccggcgagggtagcgtgcaaaccggtccggctgtccgtccggcggaagggatgcggcgttatgaaacgcgttccgcagccgggcgcggggcgcggggcggccggaaactccgtcccctctggggcgtggctgccgctgcggcggtggtgctgggcgtgtttttctatgccgaatatctgcgcaagccctattgctatatcgacggtgtggcgatttacgacaaggaggctgccatgcaggcgacggtttacctgcagggactctcggatttcggcgatcaggtccgcatggtggatgaactgataataaacgaataaaacgatacgggtatgaaaaaactgtttgtttgtacgggagcgctgctcctgctggcggtttcgcctgctggggcgcagttctttatttcgtccgctccggcgcatgaagtcgctgcggcgcagaaagccgattcggcctgtttccgccgagccgacggaaaaccggttgccatcgagaccgtggagcgcgattcgacgggaatcgatacgctccggcggattgatacggtggacagcgatctgatccggctgcgtgacggcggccgtgacggcaacatgatcctcgaagtggcgggtttcgggcttacgctgggacatacgccgatgcaacgaatggagctgaaaaagccccgcgtctggttcaatgcattcagcaatatcgaattgggattcacgcagttggtcggcgtcgactattcggggtatgcgtccggggaaaagggctttctggatcagcggctgggatcttccttccatttcagtttttcggcggtgcagctccggctggcgctcaaccggagccgttcgctctgcttgggggtgggcatgcagtacacgctcgacaattaccggctctccgataatacgatcacgctcggcaacgacggaggacgtgtcgttccggtcgcgctggacgaacccgccggcaagtcgaaagccgtcacctcctcgctcggcattcccgttcggctgacttacactccggcgaaacacctacggatcacggccgtcgcctattccgacttcctcttgggcgccgacgcgatttataagaaaccgaaggagaaaaacagcctgtccgggttccgggcctatcagttcggggtcggtctcagtgtcagctatcgcggtttcgggttcttcacccgttacggcgtgactccgctgttcaaacagcatgtgggacccgactgccatgccttctcgttcggtgtcggactcatgctctgattgcaacctaacctaatacgtgtcgattatgaaacgattgctgttgattctgattctgctccttccgcagctgcttgccgcgcagagcgccgaccggagtgccgcgcagactgccgaccggataccggccaattcggccggccgccgtaccggccgtgaatatgccatccgaaccgtggaccgcgattcgctggggctcgacaccctgcggcggctcgatgcgatgggcggcgagctgatgtcgttgcgcggagacgggcgtgaggggagtgtggtactcgaagtggccggtttcggcctgacgctgggccgtgcgccggagacggattcgcaggcggatctggtcatgaggtccgggcgtgtgaaactctacttttttaacagcggcgaattcggctttacgaagctcgtcggcgtcgattacggcggctatgcccccgaagagaaagggtttctggatcagaaactggggaattcgttccactgcgccgcttcggtgatgcaggtgcaggtcgccctgaacaagagccggacactctacttcgccaccgatctgcggttcgccgtcgacaactaccggcttgcggatgccggaatccgcttgggctacgaaaagggccgtctgctgcccgtggcgctggacgaacccgccgacaaatcgaaattcgtcacttcgtcgctgggaattccgatccggcttatctacaagccgttcaaacattttcaggcctcggtgatcgcctattccgatttcgggatagagctgacgtcgctccacaagaaaccgcgcgtggagtacgagctgtcggggctgcgaacctatcagttcggtgtaggaggaacggtttcctattacggcatcggcatcttcgccagctacggcgtgaccccgctgttcaagaagcatgcgggaccggagtgccatacgttcagtttcggcatctcgctgctcatgtaaccaaatacgaacggacatgaaacgactattattgattttgatactgctccttcctcggctggctgcggcccagagcaattccgtagacgacttttttagccgttatgccgccgccgaaggctttacgagcgtgcagctggagcagaagatgatgcagctgatgagccgtcaggccgcggaacggggcgacaaggggcttgccgtactgctgaaggacattcagtatatccgcatcatcgccctgaaagagggtgacggcggtcggttcgttcgggatgccgaggcggccgttgccgccgaccggaagtttcagcccgtcacttccggctcggagaacgggcagaccacgaagttctatatccgcgaaaccgcgctgtcggtcaaatcggaactggtgatgataacttacggcgcgaaggagacggtagtggtgaatattttcggggtgttcgatctccggcaggtcgcccgcctttcgacgattcgccctaaataagggccggattcggaaaattcgggcggcttcatcaagcggtctccggtatgaaaagtagatgcgccacggattccgtggcgtattttttttctgtatactgtgccggatttcggcgttgtatggacgatgcttgttgctgtctgatgagcggcatttgctgcatgcgaatcctgcggaagccggcgcggcttctgcgtttttttattttcggagccgatcccgtgctgttgcagggccggtgtctgcgtcgttgcggacggaatcccggaggctactccggggatttttcattctccgcccggatcgtatcggtagccctcctcgtcgtagacggggcggtcgttctccgcatcttcgtgcgccgcgtccggaatccggtcgtcgagcgggatttccgtctccaacagctcctcgtcgatcagattttcgtcgcgctcgccgcctgcgaatccgttgttctccgtggagatgacggtgcggtcgtttggaaattctacgatgtccatgtttttgccgttttggtttttcgcgtttcgtcgcaagaacgataccgttgttgcggagctgtgcgaaagaaaagtggggtcagccgtcgcttcgggtatttgccggaacgttccgcggctgcggccggaaaatagtgcccggagaacagtgcccggagcgcgcggggtgaatcactgaggagtgttgccggggatgaaggggcgggggcatgatgcaagcgtctgcgttccggggcatgaaaaagggcgggaatatgcttcccgcccttttccggattgttccggcacttttattagtcttcgaacttcgcggagaggaactcgcggttcaggcgcgcgatgtgcgcgatcgaaatcgacttggggcactcggcttggcaggcacccgtgttggtgcagttgccgaagcccagctcgtccatcttggcgaccatcgccttggcgcggcgtgcaccctccacacggccctgcggcagtttggcgagcgacgatacgcgggcggcgacgaagagcatcgccgaaccgttcttgcaggttgccgcgcaggcgccgcagccgatgcaggcggcagcgtccatcgactcttcggcgtcggcctgcgcgatcggaatcgcattggcgtcgggcaccgagttggtgcgtaccgagatgaagccgccggcctgaagaatctggtcgtaagccgagcggttcacgacgaggtccttgatgacggggaacgccgccgagcgccacggctcgatggtgatcgttgcgccgtccttgaacttgcgcatgtaaatctggcaggtggtagcggcctgaccgggaccgtgggcgtgaccgtcgatgtgcagtgagcacatgccacagataccctcgcggcagtcgtggtcgaacgctacgggctccttgccctcgtggataaggttgttgttcaagatgtcgagcatctcaagaaacgaggtgtctgccgagatgttctcgactttgtacgtctcgaagccgcccttggtcttagcgtccttttgacgccatatctttaatgtaaaattcataatttcaaattgttattaaagtttaacgtcaaaagcttagtctttgtagttgcgctgagcggggtgtacgaattcgaagttcagcggctctttcgtcagttcgggagcggcgtcctcgcccttgtattcccaaacggcggcgtatacgaagttttcgtcgtcacgcttggcttcgccctcttcggtctggtgttctacgcggaagtgaccgccgcacgactcctcgcggttgagtgcgtcgcgcgccatcagctcgcccagttcgaggaagtcggccagacgcagcgccttttcgagttccacgttgaaatccttctcctgacctacgactttcacgtctttccagaactccttgcgcagcgcctgaatctcgctgatcgccttttcgagcgactccttcgagcgggccatgccgacgttctcccacatgatatggccgagtttcttgtgaatgtcgtccaccgactgcttgccgccgatcgacagcagcttggcgatcttctccctgacgcccttttccgcctcgtcaaaagccttggtatcggtcttcaccttcggagcctgaatcttgtgcgagaggtagtcgccgatggtgtagggcagtacgaagtagccgtcggccagaccctgcatcagggccgaagcgccgagacggttcgcaccgtggtccgagaagttggcctcgccgatggcatacaggccggggatggtggtcatcaggttgtaatcgacccagatgccgcccatggtgtagtgcacggcggggaagatctgcatcggctgctcgtaggggcttacgtcggtgatctcctcgtacatgtcgaacaggttgccgtaacgtttcttgatgatctccttgcccagacgctcgatggcggtcttgaagtcgaggaatacggccagtccggtctcgtttacgccgaagcctgcgtcgcagcgctccttggcggcacgcgatgccacgtcgcgcggcacgaggttgccgaaggccgggtagcggcgctccagatagtagtcgcggtcctcttcggcgatgtccgacggcttcttggcgcccgaacgcagcgccttcacgtcttcgagtttcttgggaacccagatgcggccgtcgttgcgcagcgactccgacatcagcgtcagtttcgactgctggtcgccgtgaaccgggatgcaggtggggtggatctgcgtgaagcagggattggcgaagcctgcgcccttgcggtagcactggaatgcagccgagccgttcgacgccatggcgttggtcgagaggaagaatacgttgccgtatccgcccgttgcgatcacgacggcgtgtgcgccgtggcgctcgatctcaccggtgacgaggttgcgggcgatgatgcccttggcttcgccgtcctccacgacgatgtcgagcatctcgtgacggggatagctcttcaccgtgccggcggcgatctccttgttgagtaccgagtaggcgcccagcaggagctgctgacccgtctggccgcgggcgtagaacgtacgcgaaacctgcgcgccgccgaacgaacggttggccagcaggccgccgtattcgcgggcgaaaggcacgccctgtcccacgcactggtcgatgatcaggttggcgacttcggccatgcggtagacgttggcttcgcgggcgcggtagtcgccgcccttgatcgtgtcgtagaacagacggtataccgagtcgttgtcgttctggtagttcttcgcggcgttgataccgccctgcgcggcgatcgagtgcgcgcggcggggcgaatcctgaatgcagaatacctttacgttatatcccagttcgccgagcgaagcggctgcggatgcaccgcccagacccgttccgacgatgatgatgtcgagcttgcgcttgtttgcggggcttacgaccttgatagctgccttatggttgctccacttttctgcgagagcgccggcaggaattttagcatctaatttgaaagccatatctgttgtgtgtttattgttctggataatcggttagcaggcgcctgcgcagcaggggcagacactcttgatgaagtagatcaccacgacggcggcgaagccgaggaagatgaccgtcgccacgatgttggcgatgcacttcaggcggggataccacgtgtcgttggcccatcccacggtctggaacatcgaccatacgccgtgcgtgaggtggaaccagagggcgaagaaccacacgaggtagatcaccacgtaataccactgcgagaaggtgtaggcgatcagcgaagcgccgtccgccggatggagtccgagcgagttctcgtggccgcccaatacctccacgagctgcattttagcccagaagttgaagaggtggagcgccagaccgcccagaatgatgaagcccagtacgagcatgtttttcgacgcccacgacacgcccggttcgactaccgtcacggcgtagcgctgactgccgcgcgccttgaggttctccatggtgaggatgaccgcgtagatgaagtgcacgacgacgcctgccgccagcactgcggtgccggccagagcgtaccagttggctccgagcagcgcgcagatcatgttgtaagcctcaggcgagatgatcgccacaatgttcatggacatgtggaagagaataaagagcacgaggaaacaccccgttacgctcatcactaacttcttgcccagcgaggaattagataaaaaacagctcataatgatttaaatttgtttatatttgttaaagttttgtgttcccggacgcaaagatagccattgtttgcagaataacaatagaaacgggcgggaattttaggccgaaaaggtgggattttatgaccaagaaagaactgcgcgctgcgatgaaaaaacggaacctctcgctctcttccgaagagcgtgacgcggcgtcggaacgcatcttcggccgggtggagcgtctgcccggattttcggcggcccgctgcgcggcgtttttctgcgcgctgcccgacgagccgcagaccggtgccgcgctggcgcggtggagcgccgcgaagcgcatcgtcgtgccgcgggtcgagggcgatgcgatgcggttttacgactatgcgcccggagaactttgccggggcgctttcggaatcgccgagccgtcggttgcggagcggccgtgcgatccggcggaaatcgacttcatcgtcgttccgggagtggcttttaccgccgccggagcgcgtatgggccgcggccggggatattacgacaaatacctgtcgcagccgggtttccggggcgtgaaggccggagtctgctatgcgcatcagctggtcggggaactgcccgtcgagccgcacgacgtttttatggattacgttgtcaccaatgattgaagagatatggatgtgaaagaatttaccgccgcctacagggaggctttcggcgaacggcccgaactgcccctgctgttccgctatacggacagtccgatgcgcccggtcgaaaaggtcgggggctgtttcttcaaggcgctggccgaagcgcgccgggggctgcccgtgagtctgaatgccggcaatatcggctgcgggggcgggaagttctacacgggattcagcccgatgcccgaattcgttccgcagttcgtgtcgctcaaggagcgctataagcggacgcccgaaatggtgctggagttcatcgccgctctcgacctgcgtcccgcgccgaaggcgtggctcgaattcgtgcgggcggacgttgcggagacgtttgacggagcggagggagtcctctttttcgcggcgcccgatgcgctggcgggactggtgacgtgggcgacgttcgacaacaatgcggcggacgccgtggcgtcgcccttcgggtcggggtgcagctcggtcgtggcgcaggccgtgcaggagaaccgcaacggcggcaggaggtgttttctgggccttttcgatccgtcggtacgcccgtgggtggaaccggatgttttgagcttcgtcgttccgatgtcccgctttcgggagatgtgcggcatgatgcgtgcaagctgtctgttcgatacgcatgcgtggagcaaagttcgcgaacggattaataacgacaattgattttatggaaaaaagaagagcggcgctggtgcttgccggcggcggagcgcgtggagtggcccacatcggggctatcgaggagttggagagtcagggattcgaagtgcatgccgtggcaggcacttcgatgggggcgctggtcggcggcatgtatgcttcgggacacctcgaagcattcaaggagtggatgtatacgctcgataaatacaaggttttcagtctggtcgattttgcgctgagcaccgaaggtctcgtgaagggaaaccgcgtgatcggcgccatgaaggagctggtgcccgacgtgaagatcgaacagatgccgctgccttttgcggcggtggcggccgacctgctgaccgggcgcgaggtcgtgctcgaacggggcgggctgtacgacgccatccgtgcttcgatttcgattccttcggttttccggcccgtccgccggggcaacatggtgctggtggacggcggtacggtcaatccgcttccgctgaaccgcgttcgccgcgaaccgggcgatgtgctggtcgccgtggacgtgagcgcgccgttttccgacgagatggccgcgcgggtcaggtcctcgctgaattattataaggtgattaccgcttcgtcggagatcatgcagcagcatatcgcgcgtctgatgtgcgagatctacaaacccgacctgctgatcgagctgccggcggaccgtttcggaatcttcgaattctaccgtgcgcgggagatcgtcgaagccggccgtctggcggcacgcgccgcactcgaacagcacatggtcgtcgccggatagcggatatcctctgccggaatgcaggaaaaaccgggccgttgtggcatgatctttgtcttggggaagaagaaaagattgcgacggcccgaattttgaagaattcaaaagtagtgacgcaacttcacacagatttgagggccgtcgcaatggtttttatgacgcggatatctccggggacggacgcagtttttgtcctccggggatttttatagtactctgcactacaaaggtaaataaagtttctggaattgcaatgcccttgaccgaaagtggtattcgtgcgcctaaaatatggaaacgggcggactgtttgggcatcggggcttgttgttttctcgtatatgggctgactttacggcttgttttgccggttttttccgcggctgtaaataaaaacgttccggccttgccgccggaacgttttcgtgtaatccgttttatgcgtgactaacgtctgtccttgccgtagacgtaggccgggatgcggtggctgcgtttgccgatcggaacgccgatgccgagcgtgacgttcatgatgctctgtctgacgggtacgaactgcggcgtgtgtttggttatcaggacgtccgtgccgatgaagaagttgatccagttggggcagaggttgagtcccagccctacggcgccgccgcggttgtcgatcaccgagtagcttccggtgagcgtaaaccagcggatcgggtggaaattgaccgatccggtgatgttgtgaaaggtcttgtactcccagaaacgggccgaatacaacaggccgatgccgattttgtggcgccatacttcgtattcgagtccggcgttgatcgttgcgcgcagcatgcgcgacacgctttggggcgctcctttgtgaaattccagcacgtcgatgtcaaaatcgggcgattcggtgccgtcctccgtgacgttgacgcccgtgaacgaaagctctttcgacgagaagcccgtaacgtttttcttcttgctccagccgatgaatcccagatcgtttacggccagcgacgcctgcaggttgggcaggatgtcgtacgtggcgcccagatcgacggcgaagccgtagcctgcgggcgacgtgggtttgaagtcgatgtcgtccagcttgtaaacctcctcgccggcgtcgttgcgcttggtcgtgacgtcgagaccggcggcggtgatgtcgagtccgcctgcggcgtcgatccgccactcctcttctccgtgcgtcacgttgaatcgggtgaagtacatgcgggcgcgggcggctccgacgaggaatttgccgcggacaccgatgtaaagccggtcgtcgagcagcgggaacgagtagctgaaggccgcttcgaggtagctgtcggccgtgaggccgatgttgtggatgtcgctgcccgtgccttccttgaggaatgcgaagagcgagtagggcagcgtagcgtcggcggtcgcgcgggcgttgaggtcgaacgaccagaaattcttgtggttgcgcgtgaaggcgccgaagccgatgaggttcacgcgggtgtcgatgcccagcaggttgtcggcattgagtcccgaaagcgcctgtctggtcgaaacggcttcgtcgagcagcgtgaccagtttcccgttgcggggatagagcagtttgtccacggccagattgccgctggcgttgatgtcgatgccgcccagaccgggaatgttgacatagccgcgcagcggtgcgaaagccgggttgaattggctgcggaaggtcgttccctccatgaagtaagccgtcgggttctgggcggcacgcctgatgccagcagcagcgttgcgagaaaaacgtatattcttttcatgtatggcgccgggttagaggttgagtttcagaccgccgcgcttgacaagacgcagtgcgatgacgattttctggtcgggcgtgaatccggagccggggaaatatttctccaacttgacggggaggatgatctccgtgccgtcgatgatctggcgcaggtcgttctcgtggagccgcgtctcgccgatcttggtctttacgttgggttcgacacgtatgtcgaattccacctccgtggggtagaaccgggggctgaactgcaggctgacaggcagtgcgctgatgatttcgccgtagatgtccagcgtgtttcggggatttgccgtgcctttcggatcgaggttgtcggccagcatgtccactacgtcgctgccgaggtcgatcctgccgaggtcgtaggttacgtcttcgattttcagatccgtcaggtagccgccggccaaatctcggacctcgccggccagcttctcctgcaatcccgtggtagcgcggaacatcgtgatgaatacctgcttgaaatctttcgggtccgtgttcggcggaagcaggggcaggaacgtgccgagatacttgtcgtggagcaggtccgccacggcgttgattttggcatcggacctcttcatttgttcgatcagttcgtcgagcagctcgtcgatataggacggggtgtgctgaatcttctgaagatccacgtattttccgcctgcgggcagcggcgaaggcagccagatgtcggcttcgtcgaagagggctttgatgtcggtgccgtccttgcccagttcgctcatgctgacggtgaccgtagccagcggcagccggaattcgtcgccgatgacgacgccgtccgtgtcgatttccgacaagtcgtaattgttgtcgatacacgaagtggcgagcataccgaacagaaacagtggtaaaataaatctcataggtttgagggtgtttgcattggattgcaaatatatgccgttccgacgaataaaccaaagaattggataaattcgtcagcggagcggataaatccggccgcaatatcatcccctgacgggcttcaggggtgcatctgcgggttttgcgaaatatttgctacatttgcgttgctattgtcgttatggccgaaaccggaaaaaacaaccttaaagagcaggtggcgatgctgccgctgtcgccgggcgtctaccagttcgtggaccgctccggaacgattatctatgtgggtaaggccaagagcctgcgcaaacgggtctcctcctatttcgtgcagagcaaggagcacagcgccaaagtgcgtgtgctggtgcggcagatcgccgagatccgccatatcgtcgtcaacagcgagaccgacgcgctgctgctcgaaaattcgctgataaagaccctccagccgcgttacaacatcctgctcaaggacgacaagacctatccgtggatcgtggtgcggcgcgagcattttccgcgcgtgcagtccacccgacagctgacgcgcgacggttcgcagtatttcggtccctacagctcggtgatgatgcagcacagcgtgctcgaattcgtgcgcgaagtggtgccgctgcggacgtgcaagctcaatctggcgcccgaacagatcgccaaaggcaggtattcggtctgccttcagtatcatctgggcaactgcaagggcccctgcgtcggggagcagagcgaagcggagtacgcaaagttggtcgatatggtcgtcgcggtactcaagggcgacctgcgtcccgtgcggagctatctggaaggcgaaatggcgaatgccgccgccgggttgaagttcgagctggcgcagcgttacaaacagcgtctggacgcgctggacaactattcgagcaagtcggtgatcgtgagcgcgaagatcgtcgatgtggatgttttttcgcttcttccggacgacgatgtggcctattgcaacttcgtgcgcatccgtcacggctcgatcgtgggcgtctatacggtgaaactctcgacgggcgtcggcggcgacgaacgcgacatgctgacgctggccatccagcatatcgtggagcatatcgcgggaacgctcgccaaagaggtcgtcgttccgttcctgccttcgacgacgctgttgttcgacggcgtgaccttcacggtgccgaagcgcggcgaaaaactcgaactgctggaattctcgcagaagagcgcccgcatctaccgcgccgagcagctcaaaaacctcgaaatcaagaatcccgaacgctataccgaacggctgttgaacgccctgcaaaaggagctgcgtctcgacagacagccgcggcacatcgaatgtttcgacaactccaatctgcagggggcccatccggtagcctcgtgcgtggtcttccgcgatggaaaacccgcacgcaaggagtatcgtcacttcaacatcaagaccgtggaagggcctgacgattacgcttcgatgcgcgaagtcgtcttccggcgttacagccgtcttcaggaagagggggccgagctgcccgatctcatcattgccgacggcggaaaggggcagatgggcatcattcacgaggtgctggagtatcttgggctggacatacctgtggccggactggccaagaacgaccgccaccggacctccgaactgctctgcggctatccgcccgtgctggtcggcatccgtcccacttcgccccttttccactttttggcgcacattcaggaggaggtgcaccgtttcgccgtctcgttccaccgtcagaagcgcagcaaggcgtttatccatagcgaactggagcagatcgaaggcatcggcgacaagacgatccgcacgcttctccagcactttcgctccgtggccaaggtcaaggccgctccggccgaggagctttcggcgctggtcggtccggccaaggcgaaaaaaatcagggctttttttgaaaaatagccggattctttgaaaattgcaaagattcgactatctttgccatcccgattctacggatgaggtttgcccggatggcggaatcggtagacgcgttggtctcaaacaccaatgacagcaatgtcgtgccggttcgaccccggctccgggtacaagtaaaatcgcttaatttgttgattatggcaagttaggcgattttttattttcggattttccccgcattttccccacagagaagaaatggttgtaatgtgaaaaccaaatgttggatatcccttttgttattgtgtaacctgttggttgaattaaaataaagcatatttgataatacaaattttgtcgatgattgtagaagctgaggtattgcagcatgaccaagctcgattttaacggctgtacgggtaaacagcccgtatgtcatactaatcaagaactggttcagttgagaaatcttttgatatgctttctggaacgattgtaagctcatgagagttgtttccggttcttttggttcagttgatacgggacttcaagtttgatatgagccattttgaaaaggtcttgttgcatatcaatattcaagtaccatacgtgccgaaataatttctgaatatcaatcttttatacgattgatacccaattttacacccgaaaaatgtaaaattaggtgttgtattttctctatatcgaatcacacaggctaatgaataaggaaagatcattgagctttcgggtactttttggaaatgtcaaatgattggtatttaataatatgagatttgtatttcgtattttgcatccgcaatttgtctgcatttcttatgatgacaatgcatttttcatcttttttcgttatctttggagccaatcatataaagaatagtgcgaaaatacaaacggaacataggtgcggtattgctactggtactcttcgcatggtactggagttctgttacgctgtttccccatgctcacaatatcgacgggcatatctatgttcactcgcatcctttctccggtacctcgaataatcccggccacagccataccccgcagcagtttcaactgatcgcacacctgtcgctgctggtaatgatggtggcgacgctcgtcgcattcgccttacggctgctgggagtttccttcattttcaaaacgcaaaaaccggccgtccggcaggacgctccgatccggatttacgggctgcgtgcacctcccgtctgctgatacacattccattctgaacgggacgggcttgttgcccgcacccgttgccatgtatatgtatcagtaattatcaaaaaccggatttttccatgaaagaaaaaatattgggggcatttctcatgctcatgctccccgcggtatgctccgccggggaggagcctgccatgaagccccaaaagcagagcgacgcaaatatcaccggccatgtggtcgatgccaaaacctacgaacatctggcctttgccaccatcgccgtgaaaggcacgaccatcggcatcgctaccgatgccacggggcactatttcctgaagaacctgccgcagggccgttttacgctcgttgcctcgtctgtgggttacaggagtgccgagcagacggtcgagatctcgcccgacaagaccatcgaggtcaatttttccctgaccgaagaggcgctttctgtcgaagaggtcgtcgtgtcggccagccggacggagaccaacaagaaaacatcaccgactatcgtatcggtggcctcggccaaactcttcgaatcgaccgcctcgtgcaatctggccgagacgatgaatttccagtcgggattgcgcgtcgaaaccaactgcggcaactgcggtacgacccagctgcgcataaacggactcgaagggcagtattcgcaggtactgctcgacagccgcccgatcttcagttcgctggcatcggtctacggccttgaacagctgcccgtcgccatgatcgagcgggtcgaggtgatccgcggaggcggctcggcgttgttcggggcgaatgccatcggcggtgtggtcaacatcatcaccaaggagccgctgcgcaactccgtcacactctccaatacgaccaatatctttgagggcggtacggccgacttcaacacctcgctcaacggctcgttcgtctccgacgactacaaaatgggcgtctacctgttcggcatgattaaggaccgcgattcgtatgaccgcaacggggacggattctcggacatcccaaaactcaactccgagacggccggatttcgggcctattacaaaacttcgccctatacgcgtctgacggcggaataccaccatattcacgagtttcgccgtgggggcaacgagttcgaccagccgccccacatggccgatatcgccgaacagctcaatcacaagatcgacggcggcggattgaaattcgactggttcagtccgaacaaccgccaccggatgggcatctatacttcggcgcagaatatcgaccgtgacagttatttcggcacggacaagaatcccgacgcctatggcgctacggacgacaagacgttcgtggcgggagcccaatatacctactctttccataaactgctgttcctgccctcggaactgacggcgggcgtcgagtacaactacaatacgctgcacgacaaatacctcggcttcgggcgcgacttcgagcagaccacccatagcacgggtttctttttccagaacgagtggcggagcgaaaagctcaacttcctgatcggcggccgcgtggacaagcacaacatgatgaagaacgtcgtcttttcgccgcgcgtgaacgtgcgttacagtccgacggaaaagatcggcctgcgggccagctattcgagcggttaccgcgcgccgcaggcctacaacgaggacctgcacatcgacgctttggacaacaaggtggcgatcattcgactcgctccggatctcaaacccgaatactcgcacagcctgagtgcatcggtggatctgtatcataatttcgggcgagtgcaggccaacctgctcgtcgaaggattctacacgatgcttgaggacgtgtttacgctcgaaaaaatcggcgaggatgcccagggcaacatcattaaggagcgccgcaacgcttcgggagccaccgtggccggcgtgggagccgaagccaaggcgggtattccgggacggttcgagctgcagctgggctacaccttccagcgcagccgttacgacgaacccgaaaaatggtcggacgacgtgacgccccagcggcggatgttccgttcgccggaccattacggctacttgacggcgaacgtcaacctcacgcgtgatttcacggcgtcggtgttcggcaactacacgggccggatgctcgtgcagcacaatgctgggtatatcgagagggataccgagcgtctgacgcccgatttctgggatatgggcctgcggctgtcgtacaatttccggctcacgaaacaactgcggctggaactgaatgccggggtgaaaaaccttttcgacagcttccagaaggacctcgatttcggccagaacaaagatgccgcttatatctacggtccggcagttccgcgcacttactttatcggagcaaaattcgcgctgtgaccaagatgtaccgtgttattcggatgcagggccggttcctgcatccgaatttgtatttagagcttgaaggtcggcaaaccaataggaataagttttcaccgttccgtcgtctaggcggatgtcgtagctttgtgaaaaagatcggcccagccggaacggcacgggctgtcggaagatcggaccgtcgtaacagaatgtatgatattcgccgttttctccattgggatcgactccggcaggcagagaggctatgaagccgcggtcgatctcccggcctatggcgtcggcgccgagtccgtcggccatcgtggttacgacgaccgtccgaaatcccgatacgaggaaatcgttcatcacctcttccgaagattttccccaaagcggttccacgatttcgattccgtgcggcgagagttgctgctcccggtatttgcgcacatcgtgcaggaaaatatccccgaagatgaaacgggtcacgccctgcgtcttgaaatgctccacggcccgggacatggcgacgtcgtaatcctccatattgcctttgggcgtcaggtctacgatataaagaggaacgccgatgctttcggcctgcatttgcagtaatgccgtcgggatgccgtgcatcgtcgaacggtgcgtatcccggtttacggtagtcagcagcgcgacgatctcgtattcgcccgattgctgtgcccgcaacagcgcatgggcggaatccttgccgccgctccagttgaatacggcttttatccgttccatattatattttctgcattatggaagaacccgcagacaagggtcaaatactcgggcaatgatccgtctgtaccccatttcagttcgatgccgaagagttcggaggtcgtgcgtgcgatgtcgaatccgcaggcttcgagcgatgggcgtaccagttcggggtggcggcagggtttcgcttcggggcgggtgcaggttccttcggggcagtagaggcaggtgccgacataggcgaacgaccgtccgccgtacctgtgttccatttcgagcagacgccgttcgagccgctgccgttcggggcggatcagccggccggcttccgatatcggaacgtgctgttcggcaggagtgatcttcgtcgcgataatcaatgccgacgtatattgcgagagatatgctccgacatcgtatccgaacggcgggcatccccagctgcggttgtaattgcggcaggcacggcaacactccaaaaaccgcatggcatcacggaatcgggcgatatagtcagccacgggcaatgcagcgcaatggtcttctgcggtatatcgaaatgaaaaatccatgaaacaaaaatagtcgtttcgggcgtttgtaatgctgtttcacgaaaataatttgttgtcgagcgctgtttttcgggattaaccgttatatttgccccagatttggttttccgttccccgtgccggggaggaaatgaaaagggaatcgggtgcaaatcccggacagtcccgctgctgtgaaactccgtgaaggtttcgaacatctcagccactgatccgcaaggatcgggaaggcttcggaacaggagtcagtcagaagacctgccaagtcgattcgatgtcaaaggaccccgagggatgggcgtttgatttcggttgtatactgcatgataattttaattccgatgctgttgcaaggattgttgtgccgttttcggcacacgggttttgctttgcgggaacggctcggcctaaaacgggattcggtatggaattactcgaacgattgctatttggttccgattcgctttggggcggcggtgtcgcccactcggtgatgatcctggcgctgggcatcgcactcggcatcatgctgggcaaggtgaagatcgccggggtgtcgctgggtgtgacgggtattttgttcgtcggcatcgcgttcagctatttcggcatgaacatcgacgagcacctgatgcacttcctcaaagagttcggactgattctcttcgtctattcgatcggtttgcaggtcggtcccggatttttctcctcgttccgcaagggcggcgtcacgctgaacaaactggccgtactggtcgtggcgctcggcgtcgttacaacggttgccctttattatgtcaccgggcttccgatgacgacgatggtcggcgtgatgtcgggtgccgtgaccaataccccggggctgggtgccgcgcagcaggctttcagcgacctgcacgccggagccgatgccccggatatcgcgacaggctatgcattggcctatccgctcggagtgatcggagccatcctgaccctgctggcgttgcgctatctgctgcgtatcgacgtgcggcaggaggaagaggcggcaggtttgggtacggacgtgctgaaagacctgacgacccggcggatttccgtcgaaatctgcaatcctgccgtcgagggtaaaagcatctccggaatacgccgtttggccctgcgcgatttcgtcgtgtcgcggatttgccgtccgggcgaagctcctgaactggccgatgctgcgacgacgctccgctgcggcgaccggattttgctcgtggcggcgcccaaagatgccgaggcactggtcgcgttgctcggccgggaggtggatgccggtccgatgatgccggataggaagatgatttcacgccgaatacttatcaccaaacccgagctgaacggcaagacactcgccgaactgcgcatccgctccacgagcggcgtcaccattacacgcatcaaccgttcgggtatcgacctggtggctgcagggaatctgcagttgcagctgggcgaccgggtgacggtcgtggggcccgaactttcggtagcccatgccgagcggctcttcggcaattcgctcaagcgtctcaaccatcccaacctgattcctattttcatcggcatcgcgctgggtgtcgtgctgggcagtatttcgttctggattcccggcgttccgcagcccgtgaaactgggccttgccggcggtccgctgatcgtcgccatcctgatcggccgctacggtccgcattaccggctcatcacctatacgacgatgtcggccaacctgatgctgcgcgaagtgggcatttcgcttttccttgcgggcgtggggctgggtgccggcgaggatttcgtgcctacgctcgtcgcgggcggatatgtctggatcgcttacggagctgtaatcacgatcgttccgctgctgctggcggggcttttcggacgtttttactacaaactcaactattatacgctgatcggcgtgctttcgggcgcgtcgaccaatccgccggcactggcctattcgaccgagcagaccacgtccgacgcaccttcggtgggatatgctacggtctatccgctgtcgatgttcctgcgggtgctggcggcccagcttttgattttgattttcggataactcaaaaaggcgcggccaaacaaagacccgttactgccataacaagtcattgcatagagattagtagccggccgcgcctttttttaattgaatagttatgaatatcgtattatacggagttccggcggaaacggccggaaggattgcagaccgatacggtctgaaagtgataaattcgcccgacaaattcgacgcatcgggaacgatggtacttgttccgtcgataaacgccccgcggtacctgttggcattttacaacgccatgctgcggcatgaggacgatgtcgatgcggtcattatctgcggtgccgattcctgcgaggccgtcagcacggtgcagtactgcactccgctggggaaattcttcaccctgaacggcgatctggacggagaggaactggtatcggaactttgtctgcttctcgattcgctgttcgccgaggggaatcaaatcaatttttaggaatggagactaaaggctatgtacacgtttacaccggtaacggcaaaggcaagaccacggcggcattcggactggccctgcgggcgttgtgcgccgggaagggcgtctatgtcgggcagttcgtcaaatcgatgaaatacaatgaaacgaagatcgaacggctgttcaacggctcggacccggcattcggccgtatccgtatcgaacaactggggcgcggatgttttatcggaaaagaccccgagtcggccgatgcggaagcggcacgcaaaggatgggcccgttgtgcggacctgctccgaagcggggaatacgatgtggtgatcctcgacgaactgaccatcgctctgcatttcggactgctctcgaccgctgtcgtgctggatgtgctgcgcagccgtcatccggctgtcgaggtggttatcacggggcgttatgcaccgcaggcactgatcgatgcggccgaccttgttactgaaatgtgcgatgtgaagcactactacacgcagggcgtcctttcgcgcgacggtatcgaccgttgattattcgaggcgttggtagtagtgtaattcccggtcgttttcgtccagtgcctccgggtgcatgattgcgatcaggtcgtgtagcacgacatcgggccggacgacgcccgattcccagtaatcgttgcctccggcggcgttcagccgtttgttgcagttgtaaacggcaccgtttcttacgcatcgggtgtttgcgaatttcgggaactgcgatttcaactccccgagtgacgcggcactgcccgcattgagccacatatcggcctgtgccgtgagcatatacgcctcttcgagatcgatggggagcgaacggttcgatgtgttcttcttgtaaatataatcccctccggcgtcggcgatcagccgggcgacgtagctttcggtcgacgccataaaccacgacccggcatagggcgtgttaatcatcactttcggatgtttcgaagtcgccgccgcgacttttgcccggagcgcatcgtaacgttcgggaaccggctcgaagactgcttcgcctttttcgcggctgtcggtgatctcggcgatagccaccagccattcggccttgccgagcggcgactcttcgaggtactcgccgatgtaacagaacggaatgcccatttcgagcagtttcgactccatgccgcttgcgccgctcacgccgaacaacagcaccagatcgggccgttgtgcgagcagcagttcgtagtcgatatttccgtcgaagccgatgtccgccacggcttcggggtgtgtcgttacatatttattcgaaatatagtttcttcccgaaactcctaccacccggtcggcctgtcccaacgcatcgagcatcgccacataagtagaggagaggcaaacgatgcgcctcgctcccgctttcacgacctgtccggtgaaacctgccggaatcttttctccgttgcggacgatgaagagcgttgtttcggtgttctcggcgccttgccacggattgaatactttgagaagcgtactttgccggccttcagcaccgacgatctcgaagcccgaggcataggacggtttgtagagggtttccgtataggcgtctattcctgtcgtgttcgatgcgcaggagataaggaaggtagccgcgctaagcaggatgaaatagactgtttttttcataagaatccgttaaaaagtctgtttgcagaaaccggatgtatggttgtatggcagacaacgcatactactaacctctgtgattctccagtttctgcaaacagactatcaaaaaaatggcggcaggattaattacaggaaggtttgcaatggttcaccgcgattaaaaggccccgccgccgtgtcaaatattattgcgcaattgtttcgatctcttttcccgccaagtgcaggtcgatagcgcagttgaacaacacgcaggccggaccatagccgtagcccagatcctgcaaggtggcgttctggatcttcacgaaatcgatgcccggcaaattaactttgttcccttctttgtcgcgagcccagccgatgtcgaacgacgatccagtctcatccgtggggtcgctgttgcagacatagccgtagtcgtaccagcgggaagcttgagttggccagccgttcgtcagatcttccggggccttggccagaggcggcagcatcgtgcaacccgtatatgtcagtgcggtgccctcggccgattccatcaaccatgcgggccagaccgagaatgtcccccatggagccttggcataacaataggttccggtttccgattcgttgattgcataggagacccattctaccattccatcggacggggtgacattgtcgggacgggtataaaccattttcaggttgcgtcgttcgccggtcttgccgtattcgctgccagccagttcgtaccattcatcgtcggccttgccgttgccgttcgcgtcagacgaaacatagacaaccccttgtgcaggataagcgcctttggtggcatatgaaccgatgcggaagtcgcgcagaccattgacattcatcactgtatggtcgaatctgaatacgatgctgccgccgaacgaaccgagattcactcccagatcgtttttgtcaaacggcttgtcgacgagttttgtgttgacgcttgccaataccgtggacggcgtgtcgatggtcgagaatgccaatcccttgccgttggtaatcgcaggattatactccaagacttccgagatataatacgaataggccgtagcctcggtcgttacggtgacggtggcgctcttggtctcggtgatgccgctgtcgtcggagattgtcagcgaaatcgtgtagtcgcccgtttccagttggatgaacgaaagcgtcttgtcggttccggcttcggcagcttccgcgtcgttagggcccttcaccgtccatttgtagacggggttttggtcgaagcctgtgatcgtcggttcgatcacgagcaccttgcagcggtcggtcgaataagtcgcgtcgagcgacatcgaattggagaatccggcctggttgaccgtgatttcgagcgtcttgtcgctttcgtcctgtttgaggatcactttgcccggttcgcgggcctcggtcgaactgttcttggcgaccgtgatgaccagcgccgtctgttcgagttcggccggagcccattcgggagatgagaccacttcgtaggctactgcgctcgttccggcctgagccgttttggttgaggtgaccaggatggtgtaggtcttgccgtcggccggggcgctgatggggttgtcttcggctttcactgaaaattcataggtcgttttcgacgtgttgccgtcgtcgttctcgtctttacatgcggtaaagagtacgcctgcggccgcaatggccagcaaactccggaaagtaaatttcttcatcgttttataaattaaaggtgtgttgagttattcgtctttagcacagcggacggaatatccgtcgctgcgatagcccctgtctctttttatgctgggacgttggtcgtagggaatgatgtaaatggagagctggtaggtatcctgagtccagatacctgtattgaatcccgaattcttcaggcatccgccaccgacgcggtaacggaatccggcatagggaaagacccctagtggcgaatagtcggtcgtggccttgtcgagtccgttccatgcgaacagtccgttcttgtccgccgggacacaccacccttcgggacagggatcgaacggcgttttgccccgagcaccgcaccacaacgtgtcgcacgcttcgactttcaggggctccttgctggggaaccagtcgtcggctaacaggaaatgcatcggcgaaaatattgatttggcaaagttcgtccgggtcaggtcttcgctggttctgatcgtgcggatacccgtgcctcccgattgcgacccctcggtcagcagcgttcctgcagcgtcgtagatgggtttgctatcgaaacggttgtagtcggtctgattcgttccgcggagtatgcggtcgccggggaagggatccttgcgtccccattgatacagcagtccgcaggcggtcagcgagtcggccggtgtattctcgatgagcgctttgttgatcacggcgccgagattacggtccatgaaggtataatccgttaccccgtcgccgttgttgtcccatgtgtagatctttccgaaggccaccagttccgcattgggatcgtagcgtgtcacccaaatatgccaactccagcgtatttcgccaccaatgcggaggccgattagggcgttgcctaccttgtcggccgtcgatacgaagatcgaaccctcctcggcggtctgccccgggatcagtccgacgtttgtaattaggccgggagtatcctgccagagcaggacgggttcgggtgtcatccctgtgaaatcgctcttgtccagccattcagcatagagatcccatatggcataggctttcagcaccggaatgtcgaccgactcgcctggcttgaccataaagcagttgggagtgtacgatgcttcgaggtatttttcgttaacatcgggttggggttccggctccggttccggctccggttggggatcgggatattcgttgggattgtcgtcgttgtggtaagagcatgacgatgggcctatcacgctagcaagaagcaacaatgtgaaaaataaaaacgtttttttcatagtcatgcatcttttacacagcgtattgattgtccgtcgctgcggcaactgacatcggatttgatgatcggtcgtttttccgaaggagagatgtagatggagagttcatgggcattgccgataccggtcggtggagttcccgaccaaatactggctccgaatcctgagtttttcagacagccaccgcctgcccgatagcggaatccggcataggggaatactcccagtgccgagtagtcggttgtggcgttttcgagcccgttccagatgaacttgtcattcttgttcgctgggacacgccacccctcggggcagggatcgaatggcgttttgccccgtgtgccgcaccacagcgtgtcgcattttttgatttctgtgggtttactgctgcaataccaatcgctgtacccttcggcgccgagcagaacggtcatcggttcaagaatggatttggcgagccccgtccgcgtgagatccgtatccgtcttaacggagcggatacccgtacctccagtggcacttccttcggtaagcaacgttcccgaagtgtcgtagatcggtttgctttcgaaatagttgtaatcggtactgttggaacggcgaaagtcgtggtctccggggaaaggatccttgcgcccccattggtacatcagtccgcaagcggccaatgagtcagcggcagtattttctatgatcgccttgtcgatcgtggctccgaggttgcgatccataaaagtataatctacaactccgtcgccgttattgtcccatgtgtagattttgccgtaagctaccaattccgcatccggatcgtagcgtgtcacccaaacatgccagctccagcggattgcaccgccgatgcggatgccgattactgcattgcccaccttgtcggccgtcgatacggcgatggaaccctcttcggcttgttgtccaggaatcagtccgacgttcgtgatcaaacccggcagatcctgccaaagcagaaccggttcgggtgtcagtcccatgagatcagtttcacccagccattcggcgtagaggttccacatggcaaaggctttcagtatcgggatgtcgaccgactgtcccggcttgaccataaaacagttagaggtatacgcagcttcgaggtatttttggttaatgtcgggtccgggctccggttcgggttccggctccggttggggatcggggtattcgttggggttgtcgtcgttgtggtaggagcaggcgacattcccgacgctcagcgtcagcagcaacgcaggcagcaacagcagttttttcattttcatagtgtgaaatctctattttattggtgttggtcgggccgcacgtagatatgcatgtcgcgggccatgaaaatttcagtggaggtctcgccgatccagccgcagtactggtttagggcggtgtagacgcggataaagtcgacccccggcaggtgcaccggttcgcgggtctcgggatccacggcccatccgatgtcgaagccgttgtaatagttgccgttttcgtccttggcctcgttgggatagttgtctgcataggcgccgtatttgaacatgtattgcaggtaataggagccgttgcctgagacatccacggcgttcttgggcagcagcgtgcctcggaacgtcatttcgtcggcgtcgatccacttaggatagtagtcctggtcgtggaacttgtttttgtagacatagtcggtttgtcctcgattatcctcccatttgatgtaggtcatatcggtcagggcgctgtcgtttccttcgccgggcgtcgggacatggtcgggggcgggacgatgataggtgatctcataaccgtaggtagccgcctcatccgtgtaccacggattcttgtcgatctcgtaccacttgtcgtcaggcttgccgttttggttctcgtcgaacatgaccatgatgatacccggttccgaactgcctccgtcgacgcccggatgagctgcgctgttgaacgagttgccgtcgatgcggatgtcgtattcgcccggaacgtttacgaccgtatggtcgaatccgaacgtgatgtaaccgccgtatgcgccgagagaaacaccgctctgcatctttccggcgatggcctcctcggccttctgccgcatggtctccgccgtgtcgccctcccgatattcgggcatcgcgttcacgaactgtcccggagccgggcagtattcgtagaccgtagatatgtagggactgtactctacctcctcttcgaccacgtaaaaggtcatccggtgcacgatcggattgacggggtcgaagatttggaacgttacgtcataggtgcccgggtattgcatcaggaagatgtagtccttctcttccgagagcagcgaatcggctcccgaggcggtcttaaccgtccagcggtaactttcgcccgtgaaggcgggtttgagatcgacggtctgcatgcgggcgaccttgtaaaggtcgtccagcccgaggctcacataggggatgccgtcgttttcacagccgccgagcgcgagggccgacagcaggatggcgaatatctttttcattgccgagtctgtttgcgttcgagaaaaaccatgtgtgcggggatatcgcccgtgcggacactccatttgtggacgccttcgcgcgaataacagtgcaatacgccgctcgaaacgtagttcttggcgtcggtgacatagatgtcgccgtttcgggggtggatggcaatgccgtagggaatcacgatatcgagctctgtgccgtcggtgatgaatttgcgcgatacgacacgctttttcttgacgtcgatgatggcgtaggttaccgtgtttttcgaggtctggttgctgtactcgacactgtagacataaagggaatccccggagatgatcatgttcgaagccggaatgttcatcgcctcggccacctggtaacgtccgccgttgggttccagccggtagaggttcgacggaacgtcgtcgtagttgccccgcgaggagacccacaggttgccgtaggcgtcggctttgatgcggctgaggttgatcgctacgtcgatcttgtacatttggcgcatggtttccagttcgatgaccgagaccgtcgagtcgtagttcggggcgcggtaaccgcccgaattggcgacgtaggcgcgtccgccgatgatggccagttcatcgggctggtaacccacggtcacctggccgacgatcttataggtgtcgagatccaccttgaagaccgcgcccttttgggcgttgggatccatcgccacgggcccgacatacgcgctaacgtaggcatatttgcccttgaaccggatgtagcggcagtttggaatgtcgatctgcgtgatgcgccgcgccgtgtaggcgtccatcacctcgaccttgtgcgaacaattgatgacggcgaacagccgtccgtcgtaaacctggatgtcgttgcccacgtcgcccaattccttgacgacattgggatttttttctgcatagataccccgggcatagaccgccgtacggtagtcgaggtagtcgatgtccgccttgttgctgcccatgttgccttcgttcaggagatacatgccgatcggatcggcgtcgggatcctccccgaacggcaacacctcatactcggtggggttcaccagttcgatcttccggcagccggcggcgaggcagcagccggccaaaacgatgaagagataccttttcatggctcgcggaggttagagatcgacgctgacgacgaaccggaagttggtcttcggcatcggatagttgagcaccacgtcgtaatcctgtccgaaaagattgttaacctcggccgtggccttgagggttcgggtgcggatcttgaaagtcttttgcagcgagaggtcgctcgtgtaccacggctgggtgtggttgcgcgggatgttctcctgctggttgtagcgctggcccgtgtagatgaagctgtaattgagcccccaccccttgtagaacagcgcgaggatggccgagccgctgtgccaggggatgtagggaatctggtcacggtagtaggtgtcggccgggtcggtgatgtcgatggcctcctgataggtgtactggaacttggtcgtcacctccagtttgccgagcgtgaacagggcgttcagcacggcgtccacgcccttgatctccacttcgcccagattgagcatcgtccagcggaactgctgtcccttgggataggcgatgattttatctgtgattttgttgtagtaggcgtcgaccgaaacgtcgagcatccgcatgaaaggcgatttctcaaaattgcgcgtgtatttcaggccgacgttgaattgttcggcatattcgggcttgaggaaggcgttgcccatgtccgtatagtagaggtcgttgaaggtcggcatacggaacatccgtttgtagaaggcgcgtacagagaggtcgtggtttttcagcactttgaacgatccgaagaacgccggggtagccacagccttgtctggccgggcttcgaagcgctcgaccttttcgtggacaaagtaacccagcacgctggcctgcatcttcaaccgtccccattcaaatgccgtggccaatgcggccatatgggtatagcgcgtcggaaaggggaaggtgccatcgctttctgtgggcatgtaaaaagtggcgtcgagcgtattccattggaagtcataggccagcgacacctcccagtgttcgaagatgttgtagagattagcgcacgagaaatagaactccttctgcttgtaggtgttcttggtttggatcaacttggcgtcttgattctcgtaatgggtgtagtcggcggcgtacttggtgttgaacagcgtgcggaatttcttcgaccagcggttggtcagcgttccctggatgaacgagttggtgtctcacagccgctcaccatggcgaaagacgttgttgacgatggctcccgggatgccgcgttcggagttgtaggtgtaggcccgcacggtccattgtccgtcggccatcttgccgtggagtccggcctccatgcgcgtagcgttgatgtcgccgttctgtcggtaggccgttgtgtcgtaggcgatctcgcccagcgtgttgcggcggcggtagcggaatttgtaccggccggtggcattgatccactcgccgctgaacgacgagctgacggcgtcggagatcttatactcgtagcgcatcgagggattgatgagcccgaacgagccggtcttcatcgtggccttgaaattggcccgcttgccctcctcgaagcgggggcgccgcgtagtgatgtagatggttcccgaggccccgaaatccttggccgactggaaaatgtcactcttctgtccgttatagagcgatatttcctccacgtcgtccagcgagaagcgccccagatcgacctgcccgttctgggcgttgcccaactggattccgtcgtagaagaccgccatgtggttggtgcccattgagcggatgttgacggtcttcagtccgcctacacctccgtagtccttgagctgcacgcccgcgaaatagcggatggcgtcggccaccgaaagactgttcagccgttgcaggtcgacctccttgaggacctgtgcggggatgacttcgcggtatttgggaatgacgggggtgccgacgatgatgacctcgttgattttctggatactgtccagttttccgacgtaacgccggttcgtggtggaatcggctttatcggatgcctgaactgctgtggaaattcccccccccgcaataaatgcgagacataggatcgaaaggtagaattgcttcattatgcgcttggtatcaatagtttgttcggtaaccattgattccacagccgcaatgcaacgaaacaaaatgaaaaagtgctttacatgcattatcgattcacgcccattctccgcaggctgcgaaaccaatctgtcatgcaaggcaggtcttctgacttattccggttacgacgccttcccggttttcaccagtggctgagattgtcgatccctcatgtgtccgtttccggacaggaacttacagcagcgggaactgttgccgactttcacggcattcccttttaatcgatcggaggccatatggccttctttccgaacctttgcgtggcaaagatacaaaatttaccagtaataaaaaatgtttttattttttattagtctgtgtcgttttatattggtcgctctgtttataccaatatgtagcttcgccccgccattcgttccgatctctatataaatacccggttgccaatattgtcaaaattgataatacggttagaaatacgattgttctcagaacgataggtggttgtttgagatagcgtatctgggttttcatttcccataatgtattgttggcgagcttttcgaatttcgtcgtatcaacttcgttcttgaattcggataaagactttttgaaacttagaacttcagtaattattgttcgattctccttgtcgatcacctccagtctccccgctaactgcgccagcaacgcgttgtatctgtcggtaaattcctgcatctgctcggtttttgctccggacaaggccgtattccgttgcagttgttcgagctgctgtgcgatctgcccttgcgagcgttccgcggcctctatcagccgttcgatccgtccaagctggacattctccaaacctgcgtttcctgcgctgcctgccttggcgtttttgatggttttgacaagcgtttccttgaggtcttcatacatctcgatcgagaggtcgatcttattttcgttgttcatggttttccggttttaaggttatattttcattttggctcttcttttctgttcttcgagcttgcggcggcgttccatcgcggcgatggccattgcttcggctgcggcgttgagcagcgccgtgattcgtgctatatgctcttcgggactttctcccggcttgcgctgcaactgtgcggccgatactccgaccggcgaactggccggcggaagcggaatcgcgtcgatctttccgccggggctaggcgccgcaggctcttcgcgcgtaccgccgcccatgccgccgaacaacccggcaaatgccgaacggtaattgcctgccgccgccgagaggtttccgaggagctcggcccgatgcagcgcctgctgttgcaggtgggtgaaccggttgtcgagtttcgtaaagctgaatgccctgtcgatcttcgatccggagaactcgaagccgtttttcgagaagaggacaccctgcttgcggttggtatttccgcaatacttatagcggacgttgatgccctgttcctttaatttaccttccaactcgttccagttcttgcatttgggcagacagcctttgatcgcatcgtagatttcgtatctggtcttgtcgggttcgcgcagccgctcccgccgtacgtcgtcctttcccggtgcgagatacaatccgtacttctcggtcagctcccggcagaccttggcgttgcggatcttgatgttcctgtccgatatggtctgcccgttgttcccgacccggttgtagaccagatggcagtgcggatggggctggtcgagatggcgcaccaatagatactgcgtatcggtgatgcccatcttttgcatatactcctttgcgatctgcgtcatcagggcgtcggtcatccgcggggcgtctttgggtgagaaagacaaggagatatggccgacattgtttttcagccgtgggttgagcatggtctggtctttgaagtcctgcaccatatccttcacttccgggggcatgattccttcggcttccaatatccgggattcttctttcatcacgtagcctaccgtccccgaaaaagacgatcccgatattaccttaccgaccatcgcatatttgtttcaggagtttttcgatggccgtgatgatcgccgcatgccgtaccctgacagccgccagacctttggcattggccagccgggtcagctggttcagattccgggcgatgcctttgagctgggccatgaaatccagctgttcgcgtgtgattcgcgcccttaccgttcctcggtcgatcagctggcgcaggacttcggcaggcggttgccctgcctcgcggcagagggccgagaatcggagtttccgttcggggctgagccgcgtgctgacgacgtatttgcggatgcggccgatactgactttcgggcgtccgccttgtttgccgtatgtttttttcggtgtttccatgataagtggtttgtaagcattttttttcagaccagcgggattttacgccgaccagcggggaaggcgcagttttcgtctacgaaaacacaaccttgccttccttaaatctttacccctttccgacacggtggttcaatttccgccctttccgctttcagagcttgcagattattccgacaagagtgatcttgcttatcggatatagttttcgtggtcttaggtcggtcttttatgcgggcgatcagatagtcgtttacgtccttgtgcccgctgtaaaaatgcctttggtcgattacctcgctgcgggggcaaagacggatcagatcggaggtcgttttacgcccggcttcgtcgttgtcaaagaaggcgtgaatcaccggatgccgggagagaaacgggatggctttgggcaggttgacgaccgagttcagaaccgcggcgtcgatgcgcagtcgttcgggatgtttcagcgaaagataagcgaggaaatccataaatccttcgaaggcgatcaccgtatcggaacggttgtcgatggtggtgatatgtttgggcgaggagccgcctttgaaccgctcggagcggagctcccaccctccggcatcgttgcggaacccgacggcgaaaaaggcgcggccgtttacctcgtagcggacttcgcggcagaatgccgcggcgacagacgggacgatgccgcgcgagacgagataaccgatcagtgccggatgacggagcgggtcatcggaaaggatgcggagtgcggggacggcggctagacgcacgaccggcgagggccctccgacagctggacgctcgccaacactcggtgaaagagaagcggaaccggcgtcccttttttcaccgttttgcagccgtcggacagcttcacggctgtcgcaccgctccaaccgcatcacgagggtgagcaatgtgccgccttcgcccagtccgaagtcgtaccaaagatttcgcacgtagtccactttgaaactcggcgtgcgttcttcccgcaaaggggaaagatacataccgtagccgttgcattcgtacttgggctgaatgccccgccgtgcgaggaattgcctgatgccgatatttttcagatcattcataatgtttgtttttcgaagtttagcgatattgccttactacctactacattcgcgtaatcgtttgataaacaatttgctatgcgtagtaatgaagtgcatggcagcttactaccgtagtaattgacgtagtagcgtcgtaagatgccgtaaggtgtttttttacatcctactacacgcctgcgtgttctttttcaatgttttgcagctgtgtgtagtagcgtagtaactacaatccgtaagagacgaaaggattgggtgtgatcttctcgatgacccagccgtagacgggatttccgttgacacgtttcgagcggcgctcgaacccagccttgcgcaaggcttcacccatacgtttctcggagaggttcagcgatgaatagctgcgcaggtagtccagaatctccacggtggtcataaagcaatccgtgacggcatgttccggaggtttctcgaaccctttcagcagcatttcgtattcgatggtctggacatggaatgcggcgtttccccggtgcagttcttcgatttcggcgtcgtcgaaccaatagcggaatccgttgctcaggagtgttcgggcttcggcatatacccgatccatattgacccatatcgcccggtcgatgtcgatggataacacctcgaagggcaggaagcgccgcgagccggtcggatcggtcagaaagtcgttcccgttcaccgaggccatgaagctcgccaagtggggatactcttcgatgtagacgtcgtagggccgccggtatttgaccgaaggagccgtgatgaggttcttcagctcgttttcatcccgtttgttgagcgccttcagctggtcgtcgatgttaatgaagaggtattcggcgaccagcgtcagcacgtccttgttctgcgggtcgatttttcccgtgaaaagataactggcgagtgagcggggacagaggttgtcgagccacgtggtcttgaactttccctgctcgccggtcagtaccagacagacatggttctgacatccgaggtcattcatcgcattggcgaccacgccgacgagccatttggtcaggtacttcgaccaatgcagggcattgcgcacagtgacggtcgcggccagttcgccgatcgcctgcgttcccgttgctggcggcagtttatgaaaatacgcctgcacgggatttacacgctcggaaaagtcgctttcgagcatgctgcgcaggttctccgccgaggtggagatgccgatggtgcggtcgagctcccgccggaaggagttgagccggtatttggtcacggggaggaactcgccgtcgctgctgcggaactccgcacggcttttgaccgtgttgtagcgaaaggcgtaatgctcccgcaggaactcctcgatacgctcgttccgggactgcttgccggggactgcaacgctgtctgacgacttatttgccatcgcgctcgccgagaatccgttgaatgtccgaggtgcggtagcgaaccttgttcccgaccttaacggctttcagatatcctttgcggttccaatgccagagcgtcgcatcgcaaacgccgcatagctctttgacctgttctttggtcaggtaacgttccttgcgggcttcggcgacttgtgcagccaactcttctttggcgcggtcgataaggcttttggagaaagccaacagatcctcgccgcttacctccagccggatgctgcccggagcatcccggaggatggataacaaatctttcatacattgctttccgctcattgtgaggcgcagccttccggcggtcgggaaagcaacgccgccgcccggaaatccgagcgacggcgcaaatataatgttatgattgagcgatatttaagcgtttaattcgcggtatgttaagacggatttaacgagccttattgcgatagaaaatcttttatttcccggatgatgagggcttcgctgccccggctgccgacggtcgatccgatgagcagcggttccgtcaggcggctgtatgcttcctgtatgccccgctcgtggacgatgcggatgtcagatccgtattctgcttgcagggcattgcggaatggcttgatattgattggaaccaccagatagcgtaattcatcgagagcgatcttcagacgtgcgatgtcggtctgggtgtgtttcctcgtgaggtattcgccgatctttcttcgcaactcagcgggatgtgtgacaattggcgaaaacatttccaccaatgatctggctgcgctcggcctgccgggcttcctcttttcacctgcatcttcgacaagaagagtgcccgttgcccattccagcactcggtcgctttcggccagccgtatcgcttcgcggtgggcatcccaatcctgcttggtgcgcagttctaatttgatggagcgggagattagcagtttgatcgtggcactcatggtcattttctgcaagaatcccagatcgggcgaacgccgcagttcttcgcaacgctccaccatccgttcgaaactcttgccgaagtagagccagcaaagcatcgccggaagggtggaatccttgccgggctgttcgcactcccggatgatcttgccggcaaggtcgtgttgtcgggccgcctgttcgatctcatcgacatgctcgaacagtccttcattggctttgtcggacatgaggcgccggtaccgggggataagggacatggcttggaatatgaccgactggcaccctgcatagtcacgggcgttcatcgcctcttcgaatgcggcgtattcgtcggggtgggtgttcatccattcccgcaacttcgctttgaaagcctcgtattcctgctggcccataagtcgtttcctgttacaatccgattttcaggtaagaatcccgccgtccgagatacatattccggtaattctctttcaattcatcggataaataggagttggcgatcagcgtatctaaaagcggataagaggtgcagaatttgtcgagttcccgtcggatagttttgtcggggagccctaatcttttgccgaattcccggaaagttgtgctgttggtcattccataaggcatagattcggcggcattgtctttcagcaaccctttgtcgagagcgaatatccggtcgtctacatgcagtttggtatttatcaggtcgtatgccggggacagacggaaatcgcctgattcggtttcgagtaccgaaaaatttttcagatgggcgtcgccgttgcaaatcagaaaattgaatatgatgagatcgaaaaatttcagggtctctactttccatgcgggcaggtatcgtcgaattaactctccgcattcttcgtatgtcaagtactcatatttgtaattcttaccgccgttttgcgtagtcagtccggcgagcgatgcgaaatcttcttttctgcgctttgtgccgtcgggtttgacatcgaaccgtttggtgatataagccggttctcctcctttgaaaaagcaaagtccgtttgcggcggtttcgattccgaatacctgtgacgcgatttgcatggtcagattctcattcgcggaactatatatccggttgcggaaatcgcttaacttcggtttgaggatatagtggccttgttcgcctttttgagttaaagccagtttaccgttgcgaacgatcatcgaatatttgggttgtactcccgacagcgagattcgctcctgattgtgcagaaactcttcttgggctgcggaattgttgtcgtcatcaatgggtgtataatccaaaaatggagacacttgccggccgtcgaacagatgttttatcgcaatcggagagtagctgtcatatccttcggccaatgtggacgggcaaatcgtaatcgggttcattgttataggggttttacggttactgctccggcaacatccgtttgcgctgttgccagcagaatgccgaaatggtcgttttcatcgatatgcagcatgcgggattgaacgatgcggttgcggccctcggaaagcatgttgctgaaaaaggggaacagataggctgatctatactcctgttgtgttttgggtaatgtcagactgacggctggctgcatatcatcagcatagtatgtatcatcgtatttgaaaacatattcagtcggcgatatttctgtcaatatgccggctaacttgccattcatgtatactgccccttgtctcattgtatatttgtaattagttaattaaatttgaatagttaagacatcagagtatggaataagtccgatctctcattggttttctaaaccgggaattatgttctgaccccatactctttacatcagaatccggatagttcgtaaggtgtctgagcccgtattcgcaatgaaggaccaagatgtaagcgatgtcgttaaaaccaaaaaatgaacggccatgaggtacattggaatcgacgtgagcaaggctacattcgtggtagcttactcctccgacaaaggcggggagatccgtacttttaacaacacgaccgctggtatcagacagtttatcgggactctccccaaagacggcagtatccactgtgttatggaggcgacagggaattacagcgccttgctgctgtatatgctcaatgtcgccggaattactgtcagcatggagaatccgctgaaggtaaagaacttcgccaaagccttgctctctacggtcaagaccgataagagcgatgcacgactcattaccttgtacggagagaagatgaacccgcgtcctttcaaggtacagggagaggccatcctgcggctccgacagaaaagaaccgtcattcgccaacttactaagcagattaccgccatgtcgaaccttcgtggctctcttgcatgtctgcctgtcccggacaaaggtgcaactcataccgtagacgaaactatcaagttccttgaaaagaagcgtgacaggctccaggcggaactcacggatcttgtcgaagtggagttcagccgacaactcgcgctgctgacgaccatcaaagggataggcataacgcttgccacggcgctcatcatcactactggaggctttacctacttccaaaatgccaagcaggtgtcccggtatctcggaatttgtcccacttacgaacagtccggaacttcggtaaacatcaaagggcatatcaaccgaaacggagacgcatacactagaggacttctctatatcgccgcttggcctgccagtaggttcaatgcccaatgcaaagagacctatacgaggctcaggcaaaacggaaaatcgggaaaactcgctatgatcgctgtcgcaaacaagctcatcaggcaggcttttgctgttgtcgcgcacgataaagagtatatcgacggattcgtctccaacagaccttagtaggaaccattctccgatattattactctttttccgcattttttaatatagttcgtaattcattccgctgtttgattccgatttgtagttccagccccagtgtatcgagtattttttcaagaacttcgatcgtgggattcccttctccgcgctcaatttttgtgagcgtattgatacccacaccggccaattccgcaagtgtccgttgcgttattttcaacatctttcggcgctcttttattgcatttccgattttgttcataaatcccaatttgatgtgattttaatgcaaatatagcgcaatttatggataagtcaaataaaatcactgtttgctgtgatttatgattgcgggctaatgttcgttgcattccgaccgcgctgcggacgcaatcatctcctttacgacaacaaatttactaattcttttttcatttcatcgtcaatggtgcggtaacgcgcgaaagccttgctgccttccttatgtccgctcaaagctccgaccaaattggggtctttgacctgcttatacagatttccgacgaatgtccggcgggccagatgcgacgaggcgatctcgtaaagtacccttttttcttcttcgcgggtggtggggtttatgaccgtaaccaaccgcttcaatccggcggctttgaaaatccgcttgatcgccatattgtatttctgctcggagatgaacggcagcagtttgtcgccgtccagacctttgtaacgggctgcgatctctttggctgtctgattcagcggaacccgcacggtcagcggtcgcccttccttggtcttgcgcggtatgtattcgatggctccgtcgatcagattcgatttcgtcattttcagcagatcacccacccggcagccgatcagacattgaaaaacgaagatgtcgcgctgaacggccagttgcggatgccgcatcagattcgtgccgtaaatcttgtgcaactcctcgaccgtgatataataaggcgttccgtatgtgcattcctccaacgggaaatcgtcgaacggtcggttccgggtctttttgttgctgttgcaccagtagaagaaagttcggatgcgcgagaaacaatccaataacgtattctttcctctgggttgcggcgtgcgtgcttcgggtatagcttcgtagatttccgggtaaagagcgcagtagcggtattcattttccaaaaattcccaaatatcccgcaaggtgtcggccgttacttgatcgatgtccaatacgaatgctttttgccccctcttggttgtccggatataaagttcataccgctgtaatcctcgtttgatgacccggtaattctttttgcggacatcggaaagacggtgcttctcgaggaattcgtcgaacaatgcgatcaacgtcggcttgacggtttcttccgtggccgtttcgacattgtacttttgcggattgtaatattgttccaatgcctctttcagccactctttctgcggttctgtcgtctgtcgggactgataggctttttcgaggtaggacttgagtttgcgggcttcatcgttgtaataggaacgcatttcgtcgttgcaaacgattttgcttttgacctgttcggccttgtcatcccaaagattggggttgatggtgagccgggtcggtgcgaccatatctacctgcctgccgtcccgcaggcgtgcgtaaatggtcgccttcgattctgtatcatagcgttttacgctctttttgatgatgagagttattttcatagtacccagattccggattgtcaaagcaaaaatacgaaaaattccccacattttccccacatctgctaaaatatgttcaatcggaatttattagataaaatgattggatgtttatattctattgattataaataaaataagtatatttttatctctatttggatttaatagagtttaatatattcaaatgcggctccgggtactgattaaggtgtcaaaactttgattgtcaaggttttggcgccttttcttttttgccatgcccttctgcggcggtttgcttttcgcagatttgttcaggcggtgccgctttttgagaaggagcgtgattttgcccgttcgggaaatttcctgcggcggagcatgatatgcgctttcgcgttatgccgtctctccggtgcgattttgagttttgatacttaagtttgccattcgagttcaatttttgcattaaggagatgcggggaaggcgaatgtcgtatatttaatgcaataaaaatcagcatgcatcccaaattccaaatatataccgatatttcgtctctgccgataagcgaacacgaggcctatcaggaggagggtttctgcggtatttgcacgggaggtaccgctgtgatagaggttttttcggtgcgcagtccgatttccgaaaacgatatcgtgacgattctgccgttgcagctggtgtcgatccacgaggtcagcaacgatttctcgatgacctttttcaaagtagacaaggggatgttcctcgacatcatgagcgggttggggaaaataaccccggattttttcttctatatgcggaagaacttcctgtacagcgtgaacgatgtggaccgaaaccggtttctggggttttgccgggcgattgatctcaggggcagcaacaacgatccccttttcctgcgggagaccattctgcacctgctgcggatttattactgggatttctacgtccttttccagcagaagacgagcgccaagaagcgccctttcgtgaataccaacaaggagaatatcgccatgcggttcgccatgctggtcagcgaacaccacaaaacgcgcagggaggtcgctttttatgccgataaattgtgcatatctcccgtatacctgaccaaagtcgttcaggaggtaaacggccagtccgcccatgagatgattgccgactacgtcgttatcgagatcaaaaccctgctccgggacgcgaggctcgacataaaggccgtggcgcggcgcgccggctttgccaaccagtcttcgctgagccgctttttccgcctgcatacgggcatgtctcccacggaataccgccgtacgatccacgttacaagataaactcttgttccgtccacggtttcggaatcccgtatcgtgcaaacccgtccgatgaccgatgtgcggcgttcgtaaacagacacgccggtttttctgccgctgttccgatcggctccggcggagggtcgttttgttccgggaaccggaggtaaatcgttgtatggcagacaacgctaaactaatctcctgtgctccggctcccctgaacaaaacgccgttccttttacggcttgtgacggaattgctccgtaatgtcttccattgcgcccgcaggaccgattctgtagagccgctgattggtcgtcggtgaagtcagcggccccagcgactcgacccacccgcccagtttgatgtaatcgaacacctgcggcgcgaatccttccggcaactcctgccgtcccgaataccagccgacgtgcaggaccggcaactcctgccgcacgacctccgccagccgggcgatccggtgcggcgcggcatccccgcccataaagcagacgcaggtcaccgaccgtccgtaccgttccagcagggcgcgcagttccggggcgtcgagcacatgccccgcatcggcctgcaggtgggggctatgacaccccggacagcggttcgggcagttggcgatgttgatcgccagcgtcgtttcgcccggaatctccgcgaatacgatgtcgaaattgtagtatcggactactgtttccggagctgtcatacggcctcctgagcgggcgaacttttctgtccggccggttctttctgtgcgaacggttcctgctgcgggtgcgcaccttgctgtccgggtgtttccgtgccgcccgccgccggtttcatgttgccgtaatagcggcgttcggcctcctgctggcgtgcggccgagaagttcgagacccgtttcatgtagccgatcacgcgcgtcaggtaatccagatcgtcgctatggcatgcgggacatgctttcagatagcgtttgtcgatatgcccgcacttgttgcagaccgtattgggaatgttgaacgtaaagtagttgcagccctcggccgcggccacgcgcagcaggtggcggtactgctccttcgaaaggtgctcttcgagattcatgtgtagcgccgagccgcccgtgaggtggtcgatgtagcggcgtccgtgcagccggaatttgtcgacgacgttcagcgactggtcctcgacgacgtagaaataggagttgtagcagtcgcgcggcacggcgtatccgtcctcgcggtcccatttggcgtgcttcacgccgacgttttcggcggggatcatctcgcagttgaacatcagctccttggtgcggtatttcttgttgtaacgctcgatcagccccagtacgttctgcacgaaagcgacgtagtcgtcgttgtcgtcgatgcggattcccagaaattcggcggcttcgaccagtccgtttacgccgatggtcaggtattggcgcgaaaggttgatgtagcccgcatcgaagagcggcagcatgcctttggacttcagttccttgaggttttcgttgtaagccgtctgtactttgtgtaccagatccgtgatctcttccagataggtgagatagtgcatgccgttcttcacggcgtactggatgcagcggttgaggttgatcgtcagcacgctcttcgagccggtcgagacgccgcccgcgccgagcgtgtagctgaacccgttgtcctgaatctcgttccgcagacggcagcagctcgacagcgagtcggcgttgtcgctgatataggtgaagaacgagtgcccctcggcgtacatctgcgccgtgatgtcgccccactcccggtccatcacgtcgccgtctttggtcagcagcgccatcgtctctaccgggaaagtcagcacggtcttggtgcgctcgcggttgaaccacctcatgaaacgcttctgcagccacgacagcgactcccagtgcggatgcgaaccgtcgggaaatacgaactccccgaacaggctttcgaagtagtagcggtcgtagtaggccacgttccagaacacggcttggaagttgcgcgccccggtcggctggttgatcgagtagacgatctgttcgaagcagtcggtgattatcttgtctatcgtgcggcgttttttcgagaggtcggccacctcgtcggcccgcttgtagtaatcttcgccgtactcctgctcgatgaaatagttcatgtacatcaggaattcgggcgtggcgcatgcgcccgaaagcatcgacgacacgatgaaaaccatgttgacgaatccgccgcagaacgatttgagattcgtcggacgggtcgagttgccgcccaccgagagcgtgccgcccaagagccacggatacatggtgatcgaggcgcagtagttggccatcgacgtctcgtcgttcttgtagatgaagtgctccttgagcaggtgcaggtatttgtccgacagctccttgccgtacatctccttgatgcggtcggtcagcaggcggcggttcaggcggatgaagttctgcttcggcagctcgccgatcagcgtggcgatattcttgttttcgacgttggcgttggcgtcgtatttcgagccggtcgccgggttcgaggcgtcgcagtagttgatcagaaattcgagtttctcgcggtcttcgcgctcctcggtgtgtttctggcggtagagcatgtagctcttggccaccgcgaagtaacgctcggccatcagcgccacttcgacctgattctgaatctcttcgacgctcatgccgtcggacacgtgtacgcggctcagtatcgacgtgatgtcgtcgtcggtggcgtagctgccgaccgaaaggaaggccttgcgtacggcgcgtttgattttctcgacggaaaacgctttgcgcttgccgtcgcgttttacgatgtaaagttcggaaatgcccatattttctcctgttttgttgttggccggttatgcgataaagcccgcttttgccggcggacggccgcctgaaaagcatggtttcaccaaaaaaatcagtgtaaaacaaagttgctgcaccgctctatatcccgaaagcgggtgccgtatatcggtcaggcaggtcttctgactcgctccttccgcacgccttcccgtccgacggacagtggctctgagagtgtgcggagcgcaacggagcttacagctacggggatagtccctgatttgcacaggagttcccttttgatcccaagccggcagccgccggcggggaaccttgaccgggagcaaatatagagattgtttccgaggcggcaatcgttcggcgctccaattaatgaacaaattgtaaacaatacggccgacggcggccgacgcggaaaaaatatgccgcgtccgccctcatgcggtgatttttcgcaaaagctgtccgcatgcacctctctttgggggccgggtggcgcaaaaccgataaattttgctacctttgccgccgtatgagagcatccgtcaaaaagatatacgcttcgttcggtcccgacgccttggtcgcgttctggctgggtgtatggtggatttgcaacctctttcaggccgggcttacggagctggccaacgacgaggcctactaccatatgttcgccgaaaacatctcgtggggctatttcgaccatccgccgatgacggcgctgctggtctggcttggggagcatctcttcggcggggagttcggcgtgcggtttttctttaccctgctgcagccgctttacctctttgtcttctggcgcatcatccggcccacagatgccgaccgccgcgatgcggggcttttcgtcatgctctcggccgcgacgctcatgctgcagttgtacggttttatcgccgtgcccgacggtccgctgatgatgaccgcggcgttgttcctgctcaccttcaaatggttcaccgaagggcggcgcgcggcgtggctctggatgggtgtggccatggcgctgatggcctacagcaagtaccacggggcgctggtggtgctcttcgcgcttgcggcgacccccccccgcgtgttcctgcgtccgaccctatatctcagcggcgcggtggcgctgttgctgctcgtgccgcatttcgtgtggcagtacgagcacgactgggcgtcgctggcctatcatctggcggggcgtaactcggtcttccggcccggttacgtcgccgaatacctgctcaacctgctggtcgtcttcaacccgttcttcgtgccgctctatgtccggtcgtggatcgccgtgaagccgcagaacgccgtcgaacgcgcgctgaaattcattccggcggcgtttatcgtctttttcctgctttcgacgctgcgcggatacgtccagccccagtgggtgatcgtcgccgtgttcggactgctctatacgctcttcacctacgcccggcgtcatccccggacgcgccgctacctgatgcgcatggggtgggtgacgctcgccctgatcgccctgacgcggctggtgatgatcttcaatccgctgggcatccgttacgaagtgttcgacaaccgcaccagttacggggagatcgccgaaatcgccgacggccgtcccgtcgttttccgccacggttacgccgttgcagccaaatacgccttctataccggcggagaggcctactgccagcccaatatccgctaccggacccaccaatggcagttccgtgacgacgatacgcgctttgccggccgcgaagtgctggtcgagacgccttatgacgaagccgacacgacgggccgcgtccggagcgtcgtactgcccaacggcaagcgtttcacgtggttcgtcgatacgcatttccatccgacccgccttgtggacatctccttcacggggcttcccgaacgagttgccgcgggcgatacgctgcggctttcgctgcgaatcgaaaatccctatccttataacatcgacttgggcggcgacatgtcgctcgtcatgctctggaagcacggtcgtttccgcgtcgaggagttcgacaccggggaacgtttccggattcccgccgaggaggagatccggcgcgaagtggcgttcgtcgtgccccgacagctggccgggaccgatttcgacgccggcttcgccctgcgccgggaagggtatacgaattggtttaacggaaaacccctccgcacggaggttgcgcgatgatcgagcagtttctcaaattctgcatcgtgggcggttcgggcgtcttcgtcgatttcggaatcacctacctctgcaaggagtggctgaggctcaacaagtacgtcgccaattcgctcggctttctctgcgcctcgacgacgaattacatcctgaaccggatctggactttccacaacgagaatcctgacattacgggacagtacctccgctttctgggcattgccgccgtgggacttgtcatcaacaacctgacgatctggctgctgcacggccgtttccgcctgaatttctatctggccaagcttttcgccatcggcgtggtcaccttctggaactttttcatgaactatttctttacgttctgacctctttgctggagcgggcgtaacgatatcggattgccgccggaattgccgccgtgtttttcgatgcaattgtcattattgcggtccgcaacctttgtatgtgttataaaatccaaggtttgatgaaaattcaattttcatcaaaatatattatgaaatatttagtaagtgtatgtgggatatttaatgttttatagtattttaggttttggatatccgcttgtgttctcaaattcaaattttgtgtcactaacttttcagttttatgaaacgtattacattgattgtgatcggttttgcgatcttcgcaatgtcgtgtcaaactcaggaaagcgaatccgccacgaattttccttctgaaacgccattgcaagcgggtgcggaacataatctttatttacaagagatccttaattattttggcgagaatcctgatgttatgacgcgtgcttcagggaccgcagaggattttatcaaacagatggcaagtgtgcagacggctgcattgaaaaatcagaatttcagaaacatgtccactgcacagataaatgcctttgtgcgaaattgtgtggatgtttcggttgatccggcaattattgctgccgttgaatcctccctgccgacgaaaggtttttccattattcccgaaatgaatcgggacgcccctttgacttctgccgtgaaaggttatatggaggaagtggagcgtcttgaaactgcaaatgattctgatgctgtatttaaatctaaaatgcaaaaagcatatctgacgtggtatcgtgcggctgacgatgacgatgatcggaagttgatcgcagattcgtataatgtctttttgggttcttgggaatattggacggacaatggtagagcgtgggagattggattgaaatctacccgtacgattaagtcgttcctcaagaaacttgttattgcagatgttaaagcaacagcatgggcttgttggaaagcaaaaatatatgctctcgtattctggaaagctatgcttgcagcaggtgcttccggcagtgcatatgctgcgattcgttatttggttttttatgaaataattttccatgccagcgctgacggcatgggatattatcggataggaaatcagatgttcacagtggaagaggtgaaaaatatgctttgcagggagattgcacgccaaaatcctgagctgaatttgtccgtcgaataggcgtatgctgcggatcgttgccataaccctgattcaggggatgttgcccgctattttcgggttggtgtttttatggataaaatcggacgtaacccttatcgctccgtggccaatgctgatgctgtttatcttctttgcgaatttgctgatcgttgcggcaggttggaaatatctcggcgttacgcggagcgacaggcaggcgcaagccatacttatgttccttgccgttttcgagccgttattgacctataaagtgcttattgccgagggaacgaatttgacgccgtgggtgcaaatcgcttgttattgcgccggacaggctgctgtctgggtcacaatcgtctgggggccagagatatccggctattttatgcagcgacgttgggataaaaaggtgctatccggagaaaggaaatttccgtctcgcaaagaattcttggaaaagcgggagcggcaccgggcgcagagatacaaaaaatagtatctcataaaatagacgaagaaattacataatccgatcccgacaaaaattttttacttttggttaggatcggatttaaattctagttttcatattctatgcttttttcgcggccctgattttgcgcagcgggagtcccagcacgccgaagaacgcttcgcggaagatgccgccgctcatcttggaggtgccctcgcggcgttcgacgaagatgatcgatacctccttgagtttcagccccagccgccacgccgagtatttcatctcgatctgaaagccgtatcccttcatccttacggcgtcgaggtcgagcgtctccagcgcatggcgcgagtagcagacgaatcccgccgtcgcgtcgcgcaggggcatgcgcgtcacgatgcgcacgtacatcgaagcgaagtaggacatcagcagacgcgacatcggccagttgacgacgtttacgccctgcacatagcgcgagccgaccaccacgtcgttgccctcggcggcggcttcgtacagccgcaccagatcgtcgggattgtgcgagaagtcgcagtccatttcgcaaatgtagtcgaatccgttgtccagtccccagcggaaccccgtcagataggccgttcccagcccctgtttgccgctgcgctccagcaggtgaagcgtttcggggaactctttcctgcgttgcctgacgatttcagccgtcccgtcgggcgaaccgtcgtcgatgacgagcagttcgaaaggttcgggcagcgaaaagaccttgtcgatcatcgccgagatgttttccttctcgttgtaggtcggaatgattaccagtttgcgcatagggccttgttttcggattttctatacaaaggtagcattattttgcaaaaacgcgccgccccggctctttttctgcggggacggcggatatttccggcgctttgtgcgggagccgcgcacgctttttaccggcggcgtttcatcgcccggatttcctgcttcgcggcgtcgctcacgcggtaggactcgatgattttctgcagcgatttgttgtaggtccagtcgtccagcgagcagcttcccagccaagcgtgtgtgcgctgcggaaatttgacgtagcagaccgacaccgcccatgccacggccatgcgggcgtagtaggcttcgtggcggatgccgtcgagctgccgcagaaacgcttcgaggtgctgttcatcgacgaaattgcccaatcccatgactacggcgaaacgcacgtcgtattcggcctgcgcgtgaaaatagggttgtatgaactcccacatcggctgccgctcggcggcgcggagccgccagcagaagcagtcgcagacggcccagttgtcgatcttgggtacaaagcgggccacgtgtgcgagcttttcggcgggttcgcaccgggcatagccgatcaccagcccctgcagcatccgctcttcgaaatagaaatcctcggcttcggccagatatgcgcgccagtccccggcggcgatctccttggcgatgctgcgcaatacgggcaggcgtatgcccagcacgttttcgacgcccggcatcagcgccgaggtgaatttcatgtatttaggctcggtgagttcgagcagttgttcacgcagcgtcatcgtttgccgaatttgggggttatgccgatgaaaaaggagacgttgagccgcggcatggggcgcgaaagcaccgattcgtactcctcgttgagcaggttgtggatgcagcctttgagcgagaacgacgcccatttgcagtcgagtcccttttcgagcgagaggtcgctcatgaagtagggtttcacgcggcccaagacgccgaggtcgttgctcgacatggtgtaacgttcgctgtaccagttccatttgtaggtcagctcccaccgccgccactcgacgcgcgccgtgagggccgccgaatagacgggaatgtagacgagctgtttgccgaccgattcgtcggccgggctgaacggatcgccccggttgatcgaacgggtccatgcgaaattgccgtcgaggagcagtcgccagccgcccgaagtctcggcttcggccgagagtttggcttcgacgccgtaactgtggacgcggcggatgttgatcggggtgtagatacccagtttgggactgcctatccagagtatccagtcgtcgatgcgcgaatcgaacgccgtggccgacgcgcgcagcgaacgggcgtcgcctttgagcgtcgtttccaagcccgcgtcgaacgtccagccccgttcgggtttgaggttcttgttgccgccgggacggaagtagaggtcgttgagcgtggggtagcggtagttgcgggcggccgaagcccggacgaccacgctgccgcgtttcgagagcacgtagtccgcgaacagcgccgggatgacgggcgtggtacggtctccgtataactcccaccgcaggtcggcggcgacgcccagccgcggcacgggacgccatttcacggcggcgaacgccgaaagttcgaaccgctcctgccggtagagcgtatcggcccgcaggccgttgttgccgatcaccgagaggtcgccgctgcgcacccggtgctgatggagggcggcgttggccgagaagagccacttctcgccgagcgcatattcggcttcggccttggcgaagagcgtgtgaatgcggctccgggcgtcggtattgacgacgaactgccctttgccttcggggtcctgcttgagcaggtagcgcagatcggtgtaggtgtaacccgcgcgtgcgccgagtttcagtccgttgcgcagccgctcccagcctgccacggcccgcagcgtgcgctcgtcctgcgtattctgtttctgtttgcttttgttgcggtcggacgtgagcatcgccagtccgcggtgcgaatcgaggtaccatgccgccagcgagaaccggtcgccgccgcgcgtggtgtaatagagttcctgcatgacgtgcaggtcgcggaatccgccgttgcggttgcgctgcagggggtaatattcgccgacgatttggccgtcgtcgtcggttacgaactctttcgagttgtagttgcggaagcggaaatcattgtccgaggtgctgtagagcacgcgcgtcgaactgctccaccgcgcgcctccgtaggtcaggtgcaggaattcgtcgaacgtggcgaacgacccgatgccctgcacgtaacgcagccccaatccctgctccgcgggggctttggtcgccagcgtcaccgcgccgcccagcccgccgccggtgacgcccaccgagctggctccgtgatagatcgtcgcgtcgtcgatgaaataggcgggtatcagcgaaaaatcgacctgtccgagcatcggcgaattgaccttcatgtcgttccacgtcacctgcgtgtgcgagggcgccgtgccgcggaacgaggcggtcgcgagcgttgcgcggccgtaggatttgatgaagatggtcgaacccgtcgccagggcgtcggccagcgatgcggtgatgttttcgcgcaggacgagcgtgtccagctcggtgcgctgtacgccgatctccttcatcgggcggcgtcccgaaatatcgaccgactcgatggcgatggtgcgggccgtcgagtcacgctgcgccgcggcgggcagggcgcaggtcaggcagaggagtatcgtcgcggtgcgcagcacgcggtcagttgcgtttggttacggtccggtagcagccgatgccgcacacttcggtcgaaatctcgccgatcagcggggctttggcgttcacgcccgtctgcaccttgatgaagtcgatctgctgcaagttggcgggcgaaccgtcggccgtcacggcgtcgctgatgcgcaggcggttggtcgttccgatccggtccaccgtcgagaagttgtcggcgtagccccatgcgaacgcctgaggtctccactgtccgtcggcctgttcgacgttgtcgcgcagccgcgtgcccgtgaatttcaggtcggcggactcgatccatgccgggcagtaggacgcctgcgtatgttcgtccattcggtcgatcgtgccgctgccgccccggtcgtcggtccatgcggcggagccgtcggcgagcggcgtgtaggtgaccgcatatccccggatcgtcgcggcgttgtcgtactcgctgcctttcagctcgtaccacgtgtcgtcgggcactccgttgccgttggcgtcctgcatgacccagacgacgcccggctcggacgaggtgttcatggcgttgcccttgacgtaaaggtcgtaaccgcccgtgttgggtaccggctcggcgaatgccgcgacgaggtatccgccccatccgccgagcgaaacccagttgttctcggcgaagcgcgcggcagcgtaccggcaggctttctccggcgtatccacgttgtcgaacgcgccgccggagcgcgcctcttcgttgatgaactgtcccggtgcgggagtgtattcgagaatccgggccacgggttcgtccgtctgcgtggtcgtgatctcttcgccggagttgcaggcggccagcagaagagccgccagagggaatgcgtattttttcatcttcttcgaatgttttttacggtttgaaacagaacgatccgggggtgatgccgacgcgtatcgtgtcgatggccgcgccccgcgccgtgaagcggtagaccacgccgtgctggacgtagtcgatggcgtcggccacgtagacctccgaggtcagcggatcgaccgccacttcgtaataggtggtctgcgtatagggcaggaacggcgtgacgggcagctcctcggcgtcgacccgcatgcgccagacgtcgcggttgatgaagtagagcgtgtcgcgcgtgccgttgagggtgaccgacgagggatggtcgcccgcggcgaacgtataggtctgctcgacgcggcgcgtggcggcgtcgatgcggtagagcgccgccggaatgcctgcggtgcgtccgtcggtgacggtccagagtttgccgaagcggtcgaggaccagcgacgaaggctgcggcccgacctcgatcgagtccaccagcgtttcgcgtgcggcgtccacgaccagaatcttgtcgtcgtacgaccagcagtttacgaacacttcgtcgccccactgcaccatctgttcggtcgatttgtggccgttcatcggaatccggccgcggatacggttgctgcgggaatccacgaccgtgatgcgcggatcgtaaaggtcggtgatataggccgtcgtgtcgttggggaagtggatgtaacgcggcgagacgaccccttcgatcactcccgtgacgcggaaagtcgccgggtcgatgacatagaccgcgcccgaattgttcaccacgacgtatccgcgtcctttgtggagggtcatggactgggcgacgtcgcccagtttcatgccgttcgcgcggatgaagatttcgttttcgacagttcgcgccgcaggatcgtagaacgacagcgaagcgttgtcccagccgaagttgccctcgcacgtgatgaacacgccgcgctgcgactgtgcgaacggctcttcatgcagcggtccgtagtccatgcaggcgcagcagaatcctgcgccggcgcatagaaccgccatatgtcgtaaaacgcgtttcatcggctttcaaatgactgcggctggtacgggcggacgtgtcgtatgctgattttggcgacggcctgctgcgccccattctccgcagggtgcataatggttgaacggcatgcggcaggtcttctgactcgttaccgttccggcgccttcccgtcccggaggacagtggccaaagagtgccggaacatgttgcgtaacttacagcagcgggaactgttgccggatttcacggcattcccttttaatccccgcgcccttccggggcgtttcgggaaccgatgcgacgcaaaagtaatcttttttcgagacatgccccaaagattcggacgaaaatattaactttgttgagtaaattgcggctctgcggactccggcgagggtgatcggcggagctgttgtgaaaaaaagattaactttgcccgaaaatcggatgttatgacggttgagatacgacggataacccaagtctcggatgcgctcgaagaggcgttcgcgcggctgatgccgcagctttcgccgcggctgggcgcgccctcccgcgaggtgttgcggcgtgtggccggaagcgaaaccggggcgttgctggccgctgtggccggggaacgcatcgtcggggtgctgatgctggcgtggtacgatgcgccttcggggcgcaaggcgtggatcgaggacgtcgtggtggacggcgcggcacgcggctgcggcgcgggcgatgcgctggtgcgcgccgccgtggagcatgcggcccgcatcggcgccgggaaggtgatgctgacgtcgaacccggcgcgcgaagccgctagggcgctttatcgcaaagtcggattcgaagaggtggaaaccacggttttcgcctttaaaacagataagtgatgaaaaaattcgtgaagattgcggccatcgtggtggccgtcgtgctggtgatcgctctggtggcgccgatggtgctgcggggcaagatcgccgagattgtgaagcgtgaggccaatgcgatgctcgatgcgcggctcgatttcgagaagctggacatcagcctgttgcgccattttccccgtgcttcgctcgacctgaagggactgacgctggtgggcgaggagcctttcgcgggcgatacgatcgtcgccgcgcagcggatttcggtggtcgtgaacgtgatgtcgcttttcggcgacgaggggttcgaggtgacgaagatcatcctttcggagcctgcgctccatgcgcacaaactcgccgacggcagggtgaactgggacgttatgaaggcttcggaagaggctcagggcgaagaggaaagccccgccgatgcggaaccttcgtcgttccgcctttcggtccgcgacttcaggatcagcgacgcgtcgatccgttacgaggacgattcgacgggcatgcgcttctcgaccgcaccgctgtcgctccgtctgcggggcgatatgtcggccgaccagaccgacctcgacctgcggctgacggccaagggcatgcggctggtttcgggcggtattccgatgctcagcggcgccgaagcggagctggatgcggtgattgcggccgatctggcgaacagccgctttaccttctcgcagaacaaactgcgcctgaacgccatcgaggtaggtctcgacggctgggtggagctgaaagacgacgccgtggccatggacgtcacggccggctgcgacaaggtgcagttcaaggacgtgctttcgctcgttccggccttctacacccgcgacttccgtaatcttgcggccggcggcgaactttcgatggcgctctgggcgcgcggcgaaatgcgcggtgcggcgcttccggcgttcgagctcaggacggaggtgcgcaacggcagtttccagtactcgtcgctgcccaaggcggtggacggcatcaacatcgacgtccggatcgccaatcccggcggcgtggcggataagactgaaatcgacctctcgaaattcacgctccggatggccgggaattcgctttcggcgtcggcttatgcgaccaatctggtcagcgacccgacgttccgtgccgcggtggacggccgtgtcgatctgggggccgtcaaagaggtgtatccgctagaaaaggggatggaactgagcggcctgattaccgccgacgtgaaggtttcgggccgtatgtccgacatcgaaaagagccgctacgagcggatcggcgcgtcgggaacgttcgtcgtcgagcggctgggtctgaccatgcccgaactgcctgcggtccatatccgccgtgccgcagcgaccattacgcccgcggccatgacgctcggcgaactcggccttacgataggccggagcgatctggcggccaacggccagctgtcaggctacatcggctacctgctgcggggcgacatgctttcgggacgtctctatgtgaagtccgacctgctggacctgaacgaaatgatgaacgtcatgcccgattccgcaccggaggagaccccggagacgtcgtcggccgggacttccgccgaaccggcgcaggcgctcgaagtgccgcgcaacctgaatctttcgctcaataccgaactgcagaaggtgctcttccagaaaatgaccgtatccggcatatcgggcgagatgcgcgtggccggcggcgccctttcgctcgaacggctgcgcatgcagctcttcggcggttcggcgaccgcttcgggcagctattcgacggcggccgatccgcagcgtccggcgctgaagctgtcgctggggctttcgggcgcttcgttctccaagacgttcgacgaactggagatggtgcagaaactcgtgccgctgttcgccaaaacgggcggcgattattcgttgtcgctcgatatgacgaccgcgctcgatccgaatatggaacccgacctgcagtcgctcagcgccacgggcgaaatcaagtcggcgaacatccgtatccagaacctcgaagcgttcgatgcgctggccaaggcgctcgacaacgacaaactgcggaaaatcgaagccaaggacgtcgccgtccgtttctcgatcagggacggtcggattacgacccagcctttcgacctgaagatgggcgacataaagatcaacatgtccggttcgacgggactcgaccagaccatcgactatacggccaaggtggccctgcctgcgggttctgcgggcgggagcttggagtcggtcaatgtcggcataggcggcacgtttacctcgcccaagattacgctcggcgtgaaggaagcggccgagcaggccgtgaagaacgtcattgaccagcagattcagaagcttacgggcagcgaatcgctcggcgaggagattcagaagcaggccgacaacctgcgcaaggaggccaaacgtgccggcgacaagctggtcgaagccgccgaagcgcagcgcacgaaacttgtggacggcgccaaggagaagggcgctttggcgaagctggcggccgagaaagcgggcgacaagctggtcgaagaggccaagaagcaggccgacaaactcagcgccgaagctgaaagacagatcgaaaaactcacggcgaagcaggagtaggcaatgcttgttcttttcgccgtcattttcggaggaatcgtcacggggcgcctgctgcaaagccggcgcctcgccttcgtctcccggctgatcgccgtcatcatctgggcgttgttgttcctgctcggactggaggtcggttccgatcccgccgtcgtgggcggcatggcgacgctggggcgtaccgccttcgtgatcttcgtcttctcggtcgcgggaagcatcggggcttcgtggctgttgtggcggcgtatccggggccgcagtgcttccgggacggagggcaccggggcaaatccggcatctgcaggctctgtttcgggccgggaacttgggaccggaggcgggggctgcggtgcgaattgctcttccgggactgttgcggatatatcttccgaaacgttcccgaatccggcggcgtgtggcgcgtcatgctctgctgaaccttcggattcagcggtgggtcgcgtgtcatgctcgcccgaaccttcggagccggcattgtttcgcgcgccgtgttctccccaatcttcggaaccgacggcgtgcgagccgacgcccgcgcctgcttgtccggcatccgatccggaaaagccgctgtcgatgtggaatgcactgaaagggagtctggtgatcgtcgccttcttcgtcgccggatgcgtcgcgggacttttcgctctcgtgccgttcgatgtcgccggggcgcgcgtcagcacgtatgttctctatgcgctgatgttttgtgtcggcgtgacgctgggccatgatgaaacccttgcgggacgtgtccggcggctcgatccgcggctggcgctgctgcccgtgatgactgccgtcggaacgctggcgggcgcggctctcgcgacgccgcttctgccgccgctggccgtgaccgatacgctggccgtcggttcgggtttcggctattattcgctgtcgagcatctttatcgccgatttccggggcgcggagctgggaaccgtcgctctgctatgcaacgtcatgcgcgagatcttcacgctgctggccgcgccgctggtcgtccgttggtgcggaccgctggcggccgtctcgatcggcggtgcgaccaccttcgacaccacgctgcccgtcatcacgcaggcggccggaaagccctatgccgtggtttcgattttccacggctgcacgctcgatttcagcgttccgtttctggtgacgtttttctgtacgctgtaattgttggccgcaataaaaattcccgcgggtctcttgtatccggcgggcgttttatttccggatataggtctgcaacgccgcgacgtattcggcgaaggcgtcgcgtcccgtgtcggtgatgcggcagacggtgcagggcatcttgccccggaaggtcttttcgatttcgatgtaattcgctttcgccagcttgtccagctgtaccgaaaggttgcccgccgtggctccggtctgctgccggatgaagacgaaatcggcgctttcgaccccaatgaggatcgacatcacggccagacgcagttcggaatgcagcagggggttgagttctttaaacacggttcctgcgttcgttgtagcgcagcacgattcccgttccgaagaagaggatgacggctgccgcaagggtgagtatgaattgggagacggtctctcctgctgctgcggcccggaaaatccatgcggcgagaaatgcccccgcaatgctgatgaagagcagtccgcccagcgatccgctctggttcgaccggttggcttcgctgcggcggaacagttcgcccgtgacgcccgccgcaatggctgcgcccatggtcagcagtcccatgacgggcagctgcagtccgtcgcccgcggctacgtatcccgcagtgtagagacatacgccgagcgcataggcccagacgttcatcagtgtccggtcgttggccgtgaccgtgcggtgacttctgtaatggaaatagagtgcggccagcccggcgaccgtcccggcgaggaccagcatcagcgtcaaatcccggcccgtcgtccgccggacgacgtaatccgccgttgtgacggccagcgccagcgctcctgcgccgaagaaaagcgtgctccgcacgaaactcagtttgcggcgctgcgcttcgagcgagcgggcgatcagctccatcgcctctttttcggacattttccgttcttccatacggctattgtttcggatgattcgacttgtagttgagaatatgccccggcacgatcatcattgcgacgaatccggcgataaagagcgccggcacccagtaaccggttgcggcgagcgatacgggggcgaggatgatcgccgcggccccgccgacggcggccgggacgaagcggatgacaagccccgtgatggctgttcccatgcccatcatcagcaggatgacgaagaggatcgggaccggcatgtcgccgaataccgagagcaggctgacgaaccacgccgtgagacccattaccagccatacctgaccgattacgcggtcgatgaaggtgtagaccctgccgccgtccgccttgggcatcgtcagcagactcagcgcggttccgaatacgggcagcagcagccataggtagtaccagttccggcccggaaagagtgcgtaggcggcccatacggcgagtgtcgtgacgacggtcgcatagccccatatcaggaacggccgcccggcgttgcggaccatgcggctgcgggtgttgtcgatcatgcggccgacgagtgcgatgttttcggcggcgtccagcggcctgtccgccggtgcgctgcccgttgccgcgccatctgccgcagtgctgtccgttgccgcgccgccctccgcagtgccgttttcggtcgctgcgccgtcttcctccgtactgccgtcttcctctgctgcgccgtctttcgtcgccctgccgggccgcggtccggccgcttgttacacgtcgctgcgggagtgtctgtaccggtaattgaggatatgccccggaataatcgtcatcaggacgaaggctgccagaaacagtccggcgtgccagtttccggtgacgacgagcgagaccgacgccagcacgattccggcgatgccgcctgccacgccgggcttgaagccgatgatcaggttgttgatggtcgtgcccagaccgatcatcagcaatacggtgaatgcgaccggaaaccggacgacgaaacagatcgccagcgtgcttatcagcagggtggcggggcctattacgctccagatgaggtcgagtacgcggtctacgtaggtgtgcaccgagccttcggccgccttggggcgcgtgaagtacatcagcgcgccgcccaagaggggtagcatgaaccaaaggtagttccagcgtatgtctccggtgcaggacactgcggcccatacggcgatcaatgtcgcggcggtcgcatagccccacgccagaaacggccgtccggcgttgcggaccatgcggctgcgggtattttcgatcatccgcccgatgagtgccaaactctcggcggcatccagctttctgtcttccatgtctgtcggatttcggggttaaagttacgaatttgttccgggtgttcttcgcttttcaccggatgtctgcgcgtcttctgcggcgtttctgccgtatgcggggcggcggtttattccgcggcagggtagcggaggcgtatcgtcacggcgttccgctctgcgggcagggcgcgctttttcgcggcatagccttcggccgggccgcgttcgcccgtcttcattttgtagtcgccgtcctcgtcgtggaggagcgatacctcggccgtttcggcgtcgatgccttcgagcgttaccacgacttcgcccctcttggcgggcgacatgccgtatacgggctgttcatgtccggcgactttcgccatcgccagaacattgcctttgtcgctgcggatgtccgttacggtgatttcaagggttttggccgcggcggcaacggatgccagcgcaaaaatgacggtcaggacgagtttccatgctttcatggttgcggaggttttagcggtaattgttttcgtcgtcgcagtcggtgagataccagaccagcgacagcaccagattcagcccccatcctgctgcgacccatgccacccaccagtaatggggcgaggtctgccagttgacgaaggcgaggaatgcgcagactacgaggtaggtggtgatgcggcgtgcgaaccagcggccgaaaaggcggcgtttgtccggggaggtgttcgtgagttccatgctgttcggttttttaagattcttttattgtgccataaatatattgcgaatataaagtagtttatataataaaccaaattttccggcgggattttttcaaaaaaacagatacctatattaattacgaggaaattttccgcattccgttgtttttcatccgccgaaaaatcgtatttttgcagaaattcgataccgatccgttatgaaaagaatcctcctgctttttatcgcccttgcggccgtatggggcgccgcggctaaaatccggctgcccgaaatcatcggcaacgacatggtgcttcagcagaatgccgaggtccggttgtggggctgggccgagccgcatgccgcggtgaaagtcgagacctcgtggggcgccggagccgccgtgaaaagcgacgccgacggccgctgggccgtatcggtccggacgccggccggaagttacgagccgcagcggattaccttcgccagcggcgaccgcgtgacgttcgaccgcgtgctgatcggcgaagtgtggttcgccggagggcagagcaatatggagatgccgctcggcggtttctggcagtgtccggttacggatgcgaacgagatcatcgcccgcgcgggcgccaaaagcggaaaactccattatgtgaagattccgcatgccgcagcctatacgccgcaggaccggacggccggaagctggacgccctgcacgaccgctactgcggcgaaattcaccgctgcgggttacttcttcgccgaaatgctcaacgacgtgctcggcgttccggtcggcatcatcgactgctcgtggggcggaagccgcgtcgaaagctggatgagccgcgaagtgctgagcggttattcggacatcgacctgaccgaagagggaatctcccgcgtcgcgcagcacctgcgtccgatggtcatgtacaatgccatgctccgtcctgtggcgggctataccgtccgcggattcctctggtatcagggcgaatcgaacgtcggccgctacatggattacgccgcgcggctggccgatatggtctcgttgtggcgcggattgtgggggcgggacgacctgccgttctattacgtcgagatcgctcccttcgagtacggcaacgggaagtcgccctacctgcgcgaagcgcagtgccgggcgcaggagttgattcccaacagcggcatgatctgcaccaacgatctggtggagccttatgagttttgcaatgtccacccgaagaacaagcgggacgtggggtaccggctggctttcatggcgctgaacaagacctacgggatgaaggagatcgcctgccaaagcccgcagtacgagtcgatggagatccgcgacggcaaggcccatgtcaggttcaagtatatggatcagggtttcaaccggatggccgacatccgcggattcgagatctgcggcgccgacaaggtattttatccggccgatgcggtcgtcgaaaaccagttcgctctggtcgtttcgtcggagaaagtgccggaacccgtggccgtgcgctactgcttccgcgatttccagccgggcaatctggccgatacccgcgaactgccggtcgttcctttccgtacggacgatttctgagtttgctgaccgtcggaattgcaggacccggccctgaaaaatgaaattcacccctgccgcacttcgctgcgcaggggtgaaatcgtctgagaccgcttgtccggccggttcctgcgttatttggcgggtacttccttcagcaccacgtccgcccattcgggatggcggtagatgtattgtgccacaaaggggcactgggggatcatcggcagttttttggcgcggagatcctccaatacggcgcgcgtcagctccgagccgatgccctgtccttcgtatttttcgggaacctcggtgtgcgtcaggacgatgaatccctgcgccttgatgtattcgatcatggcgaggtccccgtcgaggtcgaattcgtatcgcttttccgcagcgttgtcgatcagttcgtgtttcttttccataatcctgagttttagatgtcggcttggtttcttcaaatatagagcctaaacgggaaaattgctacttttgcagacagaatatggacaacatttccgatatattgctggactggtacgcccgacacggccgcgatctgccttggagacgcacccgcgatccttaccgcatctggctttccgaagttatcctccagcagacccgcgtcgcacagggcatggactattacctgcgcttcacggagcgctttcccgacgtcgggtcgctggccgccgctccggaggacgaggtgctcaagttgtggcagggactcggctattacagccgtgcgtgcaacctgcacgctgcggcgcggcaggtcgcggagcggttcggaggcgtgtttccccggtcttacgacgaggtccgctcgctgcggggcgtcggcgactataccgccgcggccgtctgctcggccgcttacgacgctccctgcgccgtgctcgacggcaatgttttccgggtgctggcgcggcttttcgatatcgaccttccgatcgactccacggccggaaagcgcacgttcgctgaattggcgcaaacgcagctcgatatgcgttgtccggggcgttacaatcaggccgtcatggatttcggggcgctgcaatgcactccggcgcagcccggatgcgccgactgtccgcttgcggcgcgctgtctggctctggccgcaggaacggttgcggagcgtcccgtcaagcaggcgaaaaccaaggtgcgcgaccgttggttcaactacctgcacgtcacatgcggcgaccggaccttgttgcggcggcgcggggaaggcgacatctggcagggattgtacgagtttccgatgatcgagacggaccgtgcggcggatttctcggaactaaccgattcggaagagttccgaaccgtgttgggtggcgtcgaatggcgtctgctgcggagcgttgcaatgccgaaacaccagctctcgcaccagacgctgcatgccgtgttccaccgcttcgagatcttttcccctgtggatttcccctccgtgccgaccgccacgctgggcgactatgccgtgccgcggctgatcgaccgctatctggaccggcagccgtgaaaaatccctgccgcggcagggattcgtcttgtgtgcaaacgccgccgggagacggcacgttttgcccgtgtatctgtccgtcagcgtatcagataccagatataggcgacgtatatcatcaggaagatcgcgccctcccagcggtcgatctgcttcctgcggaaggtgaacgccgtcagcagcaacagcagggagcttagcaccaccatcagaatgtcggtcgtcgtgatgccgcccatcgtcagcgggcggatcgtcgcgctcacgccgaggatcagcagtatgttggcgatgttggacccgatgacgttgcccagcgccatttctgacttgcctttgagcagcgatacgaccgacgaggccagttcgggcagcgatgtgccgcccgcgacgagcgtaatggcgataaccgattcgctgatgcccagcctgcgggcgatctccgtggcgcttttcaggaacatgtcgccgccgaaaatcagcccggcgagtcctccggcgatcatgacgaccgccagccagagggccgccggctttttggcgccggcatcggcgggcaccgcttcgggccgtttcgtggtgcggatcgtgaaccacatcagcgcaatgtagagcgccaccatgacgatgccgtcgatgcggccgattctgtccgccgcccccgcacatatcaggcggtccgaagtgacggccagcaggatcagcgacgcggccatgccgaagggaatgtcgcgccggatgttgctccgggtgaggggcagcggccggatcagggcgcagacgccgaggatcagaaagacgttgaagaggttcgagccgacgacgtttccgatcgccacgtcgctgttgcccgccgcggccgagagtaccgagacgaccagttcgggcgtcgaggtgcctacggcgacgatcgtcaggccgatgatgaattccggaacccggaagcgttgcgcgacggcggccgagccgtccgtcaggaaatttgcgccggcgagaatcagtcccagtccgacgatcagcagcagaatgtccataatctatgcaagcagaatcaggctgacggccatgagcgccatgccggccaccacgccgtaaatcgaaatgtgagcttcgccgtattcgcgggctgcgggcagcagttcgtcgatcgagatgaagaccatgatgcccgcgactccggccagtatgcagcccatcagcgtcggcgacatgaagggcatcagcaccagataggccagcagtgcgccgaccggctcggcgagtcccgacagcagcgagagtttgaacgcctttttgcggtcgcccgtggcgtagaagatcggaatcgagaccgcaatgccttcgggaatgttgtggatggcgatcgccacggcgattgccacgcccagcgccatgttgtccacggccgacgtgaaggtggcgataccttccgggaagttgtggatgccgatggccagcgccgtcatcatgcccatgcgcatcagtttggggttgcggggttgtttgtccatctcctcgaccatgtgggcctcgtgggggttctcgaacgagggaaccagccggtcgatgacgccgatgagcaggatgcccgcgaagaagctgaccacggtgacgattatccccgtatgcgcgccccactcctccgaaagagttgtctgcgcctgctggaacaactcgacgaacgagacgtagatcatcacgccgcccgacagtccgagcgagaacgacagcagccgcttgttggtgcggcgggcgaaaaaggcgatcgcgctgccgatgccggtggccagaccggctccgagcgtcagcagcagcgggatgagaatattgtgctccatattgatatgcggtttgtcgttgacttcgcaaatatagtgcttttccggcgaaagagacggaaaaaccgaatccatttggattcggttttctgataccggcataattgcagcctgttttgtttgtgggcaattgttccggtgtgtttgctcgtgcatggttgttccggcccttttgtcggtgcaggtcgttccggcttgccggtccgtgtgcggttgttcccgttctttgggacgagcgcggctgttttcgtgctttggttcgtgtacgcctgttcccgtcctttggtctagacggggttttcgcttcgttggtccgaacatggctttcccgctccgttctgccggatatgcccccggtgcggaggcgggcctgcctatttgccgtgcgcctcgcggatcagccggcccagcacttcgatgctgtctgcggtgatgtgcggctgcggatcggctttgtcggctacgtcgagcgtcgtttcgcctgaaagcaccagcactcccatcgctttggcgttgtgggccatcgccacgtcggtgtagatgcggtcgccgaccatggcgatctggtcgggcttgaggccgtggcgcgaaaggatgcccgaaagcatgttgggatcgggcttgccgagcgtgatgtcgggacgccgtcccgtggcatgcccgatgcaggcgcagatcgagccgcagtccaccagcaccgtcggctggtcggtggggcatacgcggtcgggattggtggcgatgtagggtacgccctgcgacacccaccatgccgcgcggcagagccggtcgtattgcagcgtcatgtcgaacgccgcgacgattacgtcgggcacgtcgtcggccgaatccgccgccgattcgaacccggcagcttcgaactccgagatcatgctcggcgtgccgagcaggaagagccgtttggctgcggggtagtgttgtttgatgtagtcgatggtcgccagcgccgtcgtatacatctcctcgcgtgtggcatggatgcccagcgtttcgagtttgtgtaggtagtcggcgatggatttggaggggttgttggtcaggaacgaatagccgattcccagctctttcagcccttcgaggaagggtttggtgtaggggaagagcgacatgcccatgtagatcgtgccgtccatgtcgagcgccacgtgtttgatgccgcgcagccgctccatcagttcgtcgtgtgtgtaaaccgagcggaatttgtcgaatgttgccattattttcgtgttagattgagatgctggaacaggtagggatagtcggtttcgatcacgtcgcatcccgtggggatttcgagttcgtaacctttgattttctcggcgtcggtcgcccgccggtcgtgggtcggggcgagcgaaatcatgcacatcacgcccttctcgtgcagcttgtcgtaaagctcctgctggtcggggagcatcatcgtgccgacataggccatcatctgcgaccacggaatgcgctcttcggcgtattcgccgaactccttcatgttcttgcaccagcacgagaacatcgcctgcgggtcgcggtccaagtaggtgcgggcctgccgggcgttgcgcacggtgtacattacgttggcgggcgccagccggttgatgaagtccgacatcacctccagcggcacgtccttgatgtcgaggttgaggatggtcttgccccggctccagacgatgcactcttcgagcgtcggaatcttatagggcgtgacgttgccttcgcggtccttgaggaagaactgctgcaactcttcgaaggtgtagtccgacaccttgcccgtgccggtggtcgtgcggtcgatcgtggcgtcgtgcatcagcacgatcacgctgtccttggtcaggcgcgggtcgatttcgaagaacgaaggcatcatcgagagggtcttctcgaaggattcgatgcagttttcgggatagcccgtcaccatgccgccgcggtggccgctgacgacgatcggacgctccggtgcgtaccggaaccagtcgtgcagctgggcgcggctttcgatgtcggtgtaaaaaggtccttcggcctttttgccgctttcggcgcatccccacagcagggtgcccagcgtaagggctgtcagtagtctgaaagttttcatggatggtttttatcggttgtttttcgtaatcttgtgttctttcagcacattgcctgccgtatcgactacccggatgtcgatgcccttttcgtcggccttgacgaccgttttgtcgttgttggaattgatcaggatcgggaaatcggcgccgcggctccggtcgtcgatccattggtaacggtggtagtggccgcagagcatcaggtctatgccgcttccgtcgagtatcgggagaaacagccgttcgatctccagctcgccgtgccagccgcgtcccttgttgggcggcatgtggatcaggacgatgcggtagggcgccgaccggaactcttcgccggcgactacgcccctgagccactgcgcctgctgttcgcggtaagcgtcggcggtcgaaagcccgtaatagcggatgtcgctgtcgggtttgtcctcgcagccgtcgagtacgacgaagaagacgggaccgcggcggaacgtatagtaactttcgccggtcggcgtggggaagtagtcgagccagtgccgggcgaacttgccgcgtccgtcgtggttgccgcgcatcacgacgagcggaatgcccgccggggtgagcagctccgacgccgatgcgaggaatccttcgaaaagcgccttctccgattcgatcgaattcagcaggtcgccgttcaggcatacgaagtcgggcttctggcgcggtgcgtccccgataagcagctggaagacggaatcgcggccgtggatgtcgttcaccatccagaattccagctcgttccggtccgcgctgggcgttgtgacgggatagggcgcgtgtttgagtatgtcgctgccgtagccctcgcccaatacgacccgtttgttgccttcgtcgctgagcacggcctgctgcatgatgcggtagcggtaggttttgcccggttcgagtccgccgacgcgcacccggtgcagtttgcccagacgccgccgtccgaggtgcgagtcgtagtatttggggcgttcgacggcatagaagtgcgttccgtcatcgggggccgtttcgacccacgccgccgcgtccgtcgttgtcgtccagattacggtgaatccgtcctcggtcacgttctggaggtagggacctccggcgatgcgtgccgacggttgtgaaaatgccggacttgcgggtaatgatgctaaaaagcaagttaatagaaatagcgtatttttcatattgtttctttctgttgtgcttctgatttacaaaaataggtaaaatccctcaggttccaaaacgaaaccgaatagattttgcatttatttcgattttactgtcagaggggttgttttgtggtggaacggacggaatgggggcggttgtcgtgccggacgattgtttgttacggagagtccggacctttgttttacatggaataatcctgaaaaagaaatctttttttgctatttttatgttgtgattttggcgtaaggaagtaaaaaaggaaaaaatggagtgctatttgttgtgtgaaaacaaataattatgtatatttgcctttgctttggatgcccttttgtcgcttctgtgtgaattaattcaatcgttaatagtaatgaataaagtagaaagcgctctgtcgcgcacgaccgataccaaagctctggtaatcggaatcgaaacccttccgcgggtcgcggatatgttcaaggaactctttcccggcaggcgtgcgcttgtcgtcgccgatgccaatacgtggcgggcggccggaggcgatgttcaccggattctggctcaggcgggtgttgcgcaggacgagccgcatgttttcaccgatccgaagctttatgccgagtggacgttcgtcgaacagctggacggggtgctgtcccgcaccgacgccattcccgtcgcagtgggatcgggcgttatcaacgacctgaccaaactctgctcgcaccacaacgggcgccgctatatggtcgtgggaaccgcggcgtcgatggacggctatacggcctacggagcctcgatcaccaaggacggcaacaaacagaccttcgactgtccggctccgctgggcatggtgctcgatccgacgatcgccgccgccgcgcctgcgaaaatgtcggcgtcgggatatgccgacctgattgcgaagattccggccggggccgattggatgctcgccgatgcggtcggctccgaactgctcgacgaattcgccttttcggtggtgcaggacggactgaaggacgccctctgcgaccccgcaggcgtgcgtgccggcaatgtggccaaggtcgaacagctggccgaaggtttgctgctgagcggtttcgcgatgcaggctacgcagtcgagccgccccgcgtcgggcgccgaacaccagttcagccacctttgggacatggagcacctcaaatacaacggcgcatccgtctcgcacggtttcaaggtcggcatcggcacgctggcttcgacggcttttatcgagatgctgctcgatacgccggtcgagacgctcgacgtcgaaaaatgcgtcgccgcatggaaatcgtgggaggagaccgaaaaggatatctaccggattttcgacaacgatcctgagttcgtggcccgcggtctggtcgagaccaaaggcaagtatgtcgataaggaggggctgcgccgccagctgcagcgtctgcagaaggcgtggcccgcgctgagcggccatatccgccggcagatcattcccttcggcgaggtccgccgccgtctcgaactggtcggggcgccttacgagccggagcatatcggcgtttcgcgcgccaagttccgcgccagcttcgaaaagataccctacatgcgcagccgctttacggtgatcgatatcgcgttccgctgcggatggatggatgaatggctcgacaaactcttcggaaaaggcggaatttgggaaataaaatagcatttgggaaataaagtagtatatttgctttctgaaactactaaactttcattccgaaatgactcctgaacaaaccaagcgcttcaagtactggcagacccgtacgatcgtcgccacgatgatcggttacgcgctcttttatttcgtgcgtaaaaacttttcgctggccatgcccggccttgaggccgatctggggatctcgaaaaccagtctgggaattttcctgaccctgaacggcgtggtctacggactttcgcgtttcgtgaacggcattctggccgaccggatgaacgcccgctggtacatggctgtcggacttgcgctctgcgcattggccaacttcgccttcggattcggcgaagacgtctcctactggatcacgggccagcacgacggttcgcagttcaccaatacgatgatcctcttcatgggtatcatgtgggtgataaacggcatgctgcagggaacgggattcccgccctgcgcccgtctgctgacccactggattccgcccacgcagctggcgacgaagatgtcggtgtggaatacctcgcactcgatcggggccggtctggtcgtgatcctctgcggatatatcatgggtacgctgggcatgaacgtctcggccgatcccgacgccgtggcggccatggccgccaatctgggcgtacagcccggtgacgccgcgggtatggagcgcgtcatggcggccgctgcgcatgccggggcgtggaaatggtgtttctggattccttccgccatttcgttcgcaggcgctatcgggcttgtcgtcttcctgcgcgacacgccctcgtcggtggggcttcccgaattggagggcaccgaggtcaggaaggagaagaaagccgccaaaggtgccgagcaccgtgcattcctgatgaagcacgtcttcaagaacccgctgatctggattctgggttttgccaatttcttcgtctatgtcgtccgcttttcggtcctcgactgggggccttcgctgctgagccagtcgaagggcgtcagcatggagcacgccggctggctcgtggcgatgttcgagattgcgggcatcgtcggcatgctggtcgccggctgggcgacggacaggtggctgaaaggccgtgcccaccgcacctgcgtattctgcatggcgggagccgcgattttcgtcttcctcttctggcagctgcccggtgacgctcccgtctggctgctcttcacgaccctctgcgccgccggtttctgcatctacggtccgcaggcgctgatcggcatcgccgcggcgaatcaggctacgaagaacgccgccgcgacggccaacggtcttacgggtctgttcggttacgcgagcaccgtcgtttcgggtgtcggactgggctatgtggcgcagcattacggctggaactgggcctatgtcggcatcctcggcatggccgtcgtgggcatgctggtttttctgctgatgtggggcgcccgcgccgacggttacgatgccgaaccggagcatgattagacgtgtttgtcccgtacgggaaaacgatatggactttcgggttcgaaagtgtccggagccggttgcggtttcggatactttattttgaaatctgagaaaaaaattgttacctttgttcaattaactgctaaaagacagagtgatatgctgagtattgccgaacgacacaaatacatcctcgataacctgaacaaatacgggttcgtgcgtattaccgacgtcgccaacgaactgggggttacgaaagtgacgatccgcaaggatgtcaagatactggaaagcaaagggttgctttacaaagtgcacggcagcgcccgtcccgccaacccccatgtggccgatatggacgtgcatgtcaaggacaacatcaaccgcgactccaagcggcttatcgcccagcgcgccctcgaactgctggaggataacgattcgatcatcgtcgcttccggctcgacgatctatgcctttgccgaggagatcaaggcgcgccagtggcatcacctgaacatcgttacgcccttcctgcggctgggcgtgctgctcaacgaggcggaaaatgtcaatgtcgtgcagctgggcggcacggtgcacaagaagtcgctgtcggtgctgggcgaggaggccgcgcgttcgctcgacgactgcatctgctcgaagcttttcttcggcgtggacggcatcgacctcgaacacggcatcacgacctccacgatcgacgaggcgaagctcacgcgcaagatgatgaaggcgtcgtcgcagaatatcgtgctggccgactcttcgaaattcggacagcgcggcttcggacgcatctgcgcgctggaggacatagacgtcattattaccgacgaccggatttccgaacagatggtcgccatcgtcgaggaggcgggcgtggacctgattatcgtcaagtagggctgtcgccaaccgggaaaatgacaggcgcgccctgcgtgcgaaaaacagaggcggttccgaaatttcggagccgcctctactttgtcggaaggcaggagggttatttggtccatgcggcgtagccgctgccgatcgcgtcccagtcggtcagcgccgtgcatccgcggaagcaggtgccgaaactcttcggcgcggtgaatgcgtcggggtggagcgaacgttcgtagatgtgtactttcacgccgtcgatggtcgtgtagggcgattcgacggcgagtttggccgcatcgcggaatgtgccgctgaagtcggtgaccttacggctgtcgtcgaacatgtcggcgggaacgctcacaagttcggtgcagtttgccagaagccatttgtaggaagtgacgttggtgcaccctttgaatacgtttctgcccactttcgtcagggctttgttgccgaagaaacagcttcggaaaatgtcggccgacgtacatcctgcgaaaaattcgtcgggaatctctttgagtgcggtgcagccgtagaaagtctcctcgaagttcgtggcgttggctagtcccttgaacaggcccgcaggcagcgtttcgaaggccgtatttccggagaaggtgtatttcagcgtcgtgatctgggggcttcgggcgaaaaatccggccggaacggttttgagctgcttgcagtgggcgaggaagctttgcagcgacgtgacgtttttgagcggggcgagcagattttcgggaaccgacgtgagcgaggcgcatttggtgaaacatcccaatacgtcggtgaccttgtcgcagccgctgaacaacgaggccggaatggtttgcaggccgctgcagccttcgaatgcgtatttgaacgtggttacctcggcgaacgagtcggtcgtgttttcggggagcgttttcaggttggagcagaggtagaacgcatagtacatcgaggtcaggtttacgttgccccattgtttgacggccgtcaggtagctgcgggaggtttcggagtgtccctgcaggctgtagagttgttccaccgaaccggatacggacacttcgtagacgcccgcttccgcatattcgtaatttatcaggctgcccgtcgcggggttgagggtcagggcgagtttctcgctgtatccgtcgccgtaatcgaccgtgcagtcgatggcgccggagagcggcagtatgatcttgccgcctgccgggacggtgtattcgaggatgagcgacggaggaccttgggtgacgttgatggcggccgacacctcggcggggttgtccttgcagccggtggtgaccgtcaccacggccggccggtttccgccgtcgggattgggcgacgccgtgaggcggagtttgtcgccctctttggagatcgttatccatcctgcgtcgcaggcggcgtcccatcgctcctgattcgtggttaccgtgatggggtcaattccccccccctcgttggtgaactccgccgtattgctttccagactcagggtcggcgcgatgccttgttcgaccgtgattttgccgatgacgctttcgccgttcatgatggagattgcggcgttgcgcagctcctcggcgttctcttcgatttcgaccgtcagtcgatcccccgacaggacggccgtacaccacgaccggtcggattccggcacggcttcgaaattcttttccatggtgaggacgaactggcctgcatggtgtgtcgcggttatcgcggcagaggttccgtcttgtgaaattttgacatccgaatcgggcgaactgaatttgaccgccggattcggggtgtcgtcttccgagcatgcgccgctgaatagcagcaggcatagcagtgcataaaactgtctcataacaatgggattaaagtttgacatgaagatcgtttcaaatataatgaaattttttcgtcatcggtagaaataattgtgcttttttgtcgcagggcgcgtattgtttattttaggtcggggtgtgcggagaccttcctgcaccgggagtgcggggcgcagcggcatggacggacgaatccgcggcccggcccggtgtgtgcggattgttgaaaatttttccggcaaagttttgcacgccccgtaaaaatgtcctacctttgtcctcaattacagcgattccgaatacctatgaattgtaaccccctcatatcgtcagcgcaggcattctggcagcaggactattggtcgggcgacgtgtctccggttttcggtaattttgttttattagggtaactgtttcggttgccctatttttttacgctcgtacagatgaagacactttataccaatgccgtgatctacaccggcggccgttttgcggccggggagttcgccgtcgagggaggccgcatcgtgcccgtcgcgggcgcggcgcccgaccggaccgtggacctcggcggccggcatgtgattccgggactcgtggacgtgcacgtccacctgcgcgaaccgggattttcgcagaaggagaccatcgcctccggaacggccgcggccgcacggggcggatacacgacggtctgttcgatgccgaacctgaaccctgcgcccgatgcgcccgatacgcttcgtgcgcaggccgagatcatccgccgcgacgccgtggtgcgggtcgtgccttacggctgtatcacgatgggacagcggggtgccggcgagctggtcgatttcgcggccctcgcgcccgatgttgtcggcttctcggacgacggccgcggcgtgcagtccgacgaactgatggaggaggcgatgcgccgggcggcaaaagccggccggccggtcgtggcccactgcgaggtggacgacctgctgcggggcggctatatccacgacggcgaatactgccgtgcgcacgggcacaagggtatctgctccgagagcgagtggaagcaggtggaacgcgacatcgcgctggccgaaaagaccggttgccagtatcacgtctgccacgtctcgaccaaggagagcgtcgagctggtacggcgtgcgaaggcccgcggcgtgcgtgtgagctgcgaaacggcgccgcattatctgctgctctgcgacgaggatttgcaggaggacggacgcttcaagatgaatccgccgctgcgcagccgcgaagaccgcgacgcgctgatcgcgggcgtcgcggacggtacgattgaggtgatcgccaccgaccatgcgccccataccgccgaagagaagtcgcgcggactggccggcagcgccatgggaatcgtgggcttggagtgcgctttcccgctgatgtataaatatatggtgttgccgggaacgctcacgctcgaaaagcttgtcgcgctgatgtccgacaatccccgccggatattcggtctgggcggcggcctgaacgtcggcggcgaagccgacttcacggtgctcgccctcggcgcacagtacgagatagaccctgcggcgttcctctcgaagggccgcgccacgcctttcgccggctggccggtgcagggccgcgccgtgctgacggtcgtcgggggccgggaggcataccgggatgatggattgcagttgtgaagtctcccttctcaaaggaagatttagcgggattatagatatgccgggtttcatatggagcggaatccggatcgacagaacgaaacaaatccataaaaaggggcgatgcgaaaagcccgtaccgaaaataaatatgaaaccatttacgaagaaaattgtcttggagaacggccgtgagttttacggctacggcttcggcgccgaccgcgaggtcattaacgagatcgtcttcaatacctcgatggtggggtatcaggagattatgtccgacccctcctacacggaccagatggtcgtgatgacctatccgctgatcggtaattacggtatggccgacgaggattacgaaacgaagactccgaccatcggcggcatgatcgtgcgcgagtacaacgactcgccgagcaacttccgctatacgaagaccctgaacgaggtcttcgaggagcatgacattcccgcgatctggggcgtggacacccgcaccctgacgcgcatcatccgtaacgaaggcacccagaaggtgattatcaccggcgcggacacgcccctcgaagaggcgctccgcaaagtgcgcgagtacgcccttccccacgacatggtttcgcgcgtgagctgcaagaaacgctggatgtcgcgcgtccccaaccacaaatacgacgtggtggcggtcgactgcggcatcaagtacaacatcatccgccagctgaaccgcgtgggctgcaacgtgacggtcgtgccgttcgactcgacgctggaggagatcatggccttccgtcccgacggcgtcgtgctgtcgaacggtcccggcaacccgcaggacgtgacgcccgtgatcgagctggtcaggcagctgcgcggcaaactgccgatcttcggcatctgcatgggccatcagctcatttcgctggcttacggcgccaagaccgtgaagatgaagttcggccaccgcggcggcaaccaccccgtgaagaatctggccaccggcaagatcgagatcacgagccagaaccacagctacgccgtggacgtcgattcactggccggtacggggctagagctgacccacgtaaacctgctcgacggcacggccgagggcgtggagtgtgtcggcgacgctgttttctcgatgcagtatcacccggagagcgcttcgggtccgcaggacagcggctatttgttcagaaagtttaccaaaataatggaggagcgtaaaaatgcctaagagaagagatataaagaaggtaatggttatcggttcgggtccgatcgtcatcggacaggccgccgaattcgactatgcgggcacgcaggcctgcctcgcactcaaggaagagggctacgaggtgattctcgtgaattcgaaccccgccacgatcatgaccgacacgcatattgcggacaaggtatacatggagccgctgacgctcgaatacgtcgccaagatcatccgcttcgaacgccccgacgccatcgtgccgggactgggcgggcagacgggtctgaacctcgcggtgcagctcgccaagaagggcattctgaaagagtgtcaggtcgagattctgggcacctcgttcgagtcgatcgaacgtgccgaggaccgcgaacttttcaaggagctgtgcgaatcgctgggcgagccggtgatcgagtcgaagatcgccatgtcggtcgaggaggccgtcgaggtcgccgccgagatcggctatcccgtcgtgctgcgtcccgcctatacgctgggcggcacgggcggcggcttcgccgacaacgaggagcagctgcgcgagatgatgcgccacgccctgttcctttcgcccgtacatcaggtgctcgtcgagaagagcatcaagggatacaaggagatcgagttcgaggtgatgcgcgaccacaacgacacggccatcagcatctgctgcatggagaacatcgaccccgtgggcgtccatacgggcgactcgatcgtcgtggcgccgtgccagacgctcaccaataaggagttccagatgctgcgcgacagcgccctgaagatcatccgcgagctgaagatcgaaggcggctgcaacgtgcagttcgcactcgaccccctgtcgttcaaatactacctgatcgaggtgaatccccgcgtgtcgcgctcctcggccctcgcatcgaaggccagcggttatccgatcgcgcgcgttacggccaaggtggccgtgggtctaaccctcgacgagatcatgctggccaatacgcccgccagcttcgagccgacgctcgactacgtcgtgaccaaagtcgcccgcttcccgttcgacaagttcagcgacgcgtcgaacaagctcggtacgcagatgaaagccacgggcgaggtgatgtcgatcggccgcacgatggaggagagcctgctgaaggcgatgcgttcgctcgaaaccggcgtctgccatatctaccacaagaagttcgaagactggacgaacgactggctgctggaatacatcgccgagcctaccgacgaccggctgtatgccatcgcgcagctgatccgcggcggcgtcgatctggtgctgatctacaaccgcacgaaaatcgacatgttcttcctcgaaaagttcaagaatatcgtcgaattcgagcgcgtcgtcgaggccgctccgatggatatcgaagtgctgcgcgaagccaagcgcatgggtttcagcgataagttcatcggccagctgtggggcgtctcgcagcacgacatgtacctgctgcgcgagaagaacggcatcttcccggtctacaagatgatcgacacctgcgccagcgagttcagttcctacgtgccttatttctactcgacctacgaggacgagaacgagtcgcaggtgagcgacaaggagaagatcgtggtgctcggttccggtccgatccgcatcggtcagggcgtcgagttcgactattcgaccgtacacgccatctggtcgatccgcgaagcgggctatgaagccatcatcatcaacaacaaccccgaaaccgtctcgaccgactataccaccagcgacaaactctacttcgagccgctgatggtcgaggacgtgatgaacgtcatccacctcgaaaaaccgaaggcgatcgtcgtgtcgctcggcggacagaccgccatcaacctcgccgagccgctctcccggctgggcgtgcccatcatcggcaccgactgcgaagctatccgcaacgccgaggaccgcggctgcttcgagaggatcatggaggagctgcgcatcccgcagcccgaagccgaagccgtcaccgacatcgagtcgggcgtgaaggccgccgcccgcatcggctatccggtgctggtgcgtccgagttacgtgctgggcggccgcgccatgcagatcgtttcgaacgaggagcgcctgcgccactacctgcagacggccgtcgaggtcaacgacgactcgccggtgctggtagaccgctacatcatgggcaaggagcttgaggtggacgccatctgcgacggcaaggacgtctttatccccggcatcatggagcatgtcgagcgcacgggtatccattcgggcgactcgatcagcgtctatccgaccttcagcgtcagccagaaggccaaggacaagatcatcgactacacggtgaagctcggtctgcggatcggcatcatcggtctctacaatatccagttcatcctcgacggcaacgacgaagtctacgtcatcgaggtcaatccccgctcgtcgcgcacggtgccgttcctctccaaatcgacgggcgtcccgatggcccatatcgccacgcaggtgattctgggcaagacgctgaaggaactgggcgtcaccgaagtatacggcaaggagaagaaacgctggtacgtcaaggcgccggccttctcgttcgccaagatccgcggcatggattcctacctctcgcctgagatgaaatccacgggcgaggccatcggctacgacgacaagctcacccgcgcgctttacaaggcgttgcaggcgacgggcatgaacgtctgcaactacggcacgatcttcgtcaccatcgccgaccacgacaaggagcaggcgctgcccctcgtgcggcgtttctacgacctcggcttcaacgtcgaggcgacgaccgggaccgccgaattcctgcgcgaacacggcatccgcacccgcacgcggcgcaagttgagcgagggcagttcggagatcatcgacgcgctccgtcagggccacgtgagctacgtgatcaataccatcgacatcaaccagcacaatacccggctcgacggatacgaaatccgccgcacggccgtcgagaacaacgtgacgatcttcacggcgctcgaaacggtgcaggtgctgctggacgtgctcgaagagatcaccttcggagtctcgaccatcgacgcgaagtgatttccggcgtgaggacgccttccgtacgcacctctttcgctccgaacgggatacggtcccgtccggagcgaaacgaacgaagcgcgggggctgttctccggatcaaaaatcgaaagggaatacatgtataagaaaggcatctataagattcttgcgaacgagccgctgacggcctcggtgtggcgcatggtgctggagggcgataccgagtggatcgtccgtccgggacagttcgtcaatatcgcgctcgaaggccgctacctgcgccgtccgatttcggtgtgcgactgcgatgcacggaccctcacgctcatctataaggtcgtgggcggaggtacggagcagatgagccgcatggcggcgggcgcggagctggacctgctgacgggactcggcaacggcttcgacacctccaacgatgcgcggcggcccctgctggtgggcggcggcgtaggcgtgcctccgctctacaagctggccaaagcgctgctggcggagggcaaaccggtgagcgtcgtactgggattcaacacggcggacgaggtcttctacgccgacgaattccgggcgctggggtgcgacgtgcatgtcgccacggccgacggttcggccgggacgaaaggcttcgtcacgacggccatcgccggcgacggcatcgacttcgactacttctatgcctgcggtccgctgccgatgctgcgcgcgttgtgcgactcggtcgcgcaggacggccagctgtcgttcgaggagcgtatgggatgcggtttcggcgcctgcatgggctgttcgtgcaaaacgaaatacggcaacaaacgcatctgcaaggaggggcccgtattaacgaaaggggagatcatatggtaagagagcagttcatcgcacagaaccggccggcaggaaaacctgccccggatatgtccgtcaccctgagcggtttgaagctggacaacccggtcgttccggccagcggtacgttcggatacggcaacgaattccgggatttttacgatatcaacatcctcggttcgttctcgttcaagggcaccacgcgcgaaccgcgcttcggcaatcccacgccccgcatcgccgaatgtacggcggggatgatcaacgctgtgggactgcagaatcccggcatcgacgccgtgatcgccgaggagctgccgcgcctgaagagcttctttcataaacccgtgatcgccaatatcagcggcttctcgatcgaggagtacgcctattgctgcgagcggatcgaccgcgaggagcaggtcggcatcatcgaggtcaatgtctcgtgccccaacgtgcggcacggcggcatgtcgttcggcacttcgcccgaatgtgcggccgaggtgacgcgcgcggtgaaggccgtgaccaccaaaccggtctatatcaaactgtcgcccaacgtgacggacatcgtctcgatcgcccgcgcctgcgaagaggccggtgccgacggcatctgcctgatcaacaccctgctgggaatgcggatcgacgtgaggtgccgcaaggcggtgatcgccaatacgatgggcggtttttcgggcgctgcggtcttccccgtggccgtgcggatggtttatcaggtcgccaaagcctgctccgtacccgtcatgggatgcggcggcgtgacgacggcccgcgacgtgatcgaaatgatgatggccggagccacggccgtgcaggtcggcgctgcgaatctggtgaatccctatgcctcgaaggagatcgtcgaagccctgcccgccgagatggagcggctggggatcgagcggctgagcgacattataggaatcgtagaataaagttaaaatcggatatgatgcaacacgacgtaattatcgcctgcgacttcaagtcggcggaagacactttcaagttcctcgacctgttccgggacgaggagcgcaaaccgttcctcaagatcggcatggagcttttctatgccgaaggccctgccatcgtgcgcgaaatcaagcgccggggccaccggattttcctcgacctcaaactgcacgacattcccaacaccgtgaagaaggcgatggccgtgctgtcgcgtctggacgtcgatatgtgcaacgtccatgcggccggaacggtcgagatgatgaaatacgccctcgaagggcttacccgcgaggacggcacgcggcccctgctgatcgccgtgacgcagctcacctcgaccagcgaggagcgcatgcggcaggagctgcttatcaacgcttcgatcaacgacacgatcgtcaaatacgcgcagaacacccgtgccgcggggctggacggcgtggtttgctcgccgctcgaagcgggcatggtgcacgaagcctgcggaaaagagttcctgaccgtcacgcccggcgtgcgttttgcagacggagacgttgcggaccaagtgcgcgtcaccacgcccgcccgtgcgcgggagatcggctccgacttcatcgtcgtgggccgtccgatcaccgccgctgcggaccccgtggccgcgtaccgcaggtgcgtaagcgaattttgcgattaaacacgattaaaaacagtcgattatgaaaccggtaaaacttttctacctgaaaaactgtcccttctgccgcaaggcgctgcgttacatcgaagaggccaaggccgcacaccccgaactgcagccggtggcgatcgaaatgatcgaggagtcggagcagtccgatttggctgacacattcgattactactatgtgccgacgttttacgtcgatggcgtgaaggtccacgagggcggcatctatgccgaggaggtggagaagattttgcgttcggcgctggaataaacaactacagaatatcatggagaaatcaattgctaaagacctgctttcgatcggcgcggtgttcctgcgccccgaacagccgtttacatgggccagcggcatcaaaagccctatttactgcgacaaccgcctgacgctgacggcgcctgtcgtgcgcggacacgtcgaagaggggctggcgcagatcgtccgcacccgctttcccgaagccgaggtgctgatgggaacttcgaccgcgggcatcgcccacgccgccatcaccgcgacgatcctcgacctgccgatgggctatgtgcgcagcggttcgaaggatcacggccgcggcaaccagatcgagggcaagctcgaaaaggggcagaaggtggtcgtgatcgaggacctgatctcgaccggcggttcgtgcatcgaggtggtgaccgccctgcgcgaagccggcgccgaggtgctgggcgtggcgtcgatcttcacctacggcatgaagaagggactggaccgcatgaaagaggcgaacgtcgtcaattacagtctctcgaatctcgacgcattggtggaagtggccgccgaggagggatacatcaagcccgaagacaaggcccgtctgctgaaattccgcgacaatccgtcggacgaaagctggatggaaaaatagtttgccgggatcgcacgacgcttttccgcacctcgcttgggggcatggaaatgcggcttgcactccctccgcactccggtcggcgccgcgtgcaatccgcagcatgccgccggccggctgcaaaccccgattttgataaatgaaacaacctatgagacacctgattgacccgaccgacctgacggtggccgaaaccgaacaaatcgtggcgctggccgaagatatcatcgccaaccgcgccaaatacagcgaagcgtgcaaggggcgcaagctggcgacgctcttttacgagccttcgacccgcacccgcctgagtttcacctccgccatgatggagctggggggcagcgtcatcggcttttcggacgccaattcgtcgtccgtgtcgaaaggcgaaaccgtggcggacaccgtacgcgtgatccgctgtttcgcggacattatcgccatgcgccacttcaaggagggcgcgccgctcgtagcttcgcagtacgccggaattccggtcatcaatgcgggcgacggcagccacagccacccgacgcagacccttacggaccttctgacgatcaagcgcgagaaggggcgtttcgacaacatgacgatcggcttctgcggcgacctgaaattcggccgcacggtccattcgctcatcaaggcgttgtcgcgctattcggggatcaaggtgatcctgatcgccccgcaggagctgcgtcttccggactacatgctggccgagatgagcgagaattcgaaactcgaattccgcgaagtcgagaccatggaggaggtgatgcccgaactggacatactctacatgacgcgtgtgcagaaggagcgtttcctcgacgaggaggagttcgaccgcgtgaagaacagcttcgtgctcgatcccggaaagctcgaaaccgccaaggaggatatgattatcctgcacccgctgccgcgcgtgaacgaaatcacgcgcgccgtggacaacgatccccgcgcagcctatttccgacaggtcgagaacggcaagttcgtacgcatggcgctgatccttacgctgctgcgctgggccgacgaaaacaagcccttcgagaagactcccgttttcagcgaagactacgtcgtcaatgagatggagtgctccaaccggcgctgtatctcggcgaccgaagatgtcgaccggcttttccaccgcctgcccgacggctcgtgccgctgcgcctactgcgaggccaaggcgaagtgatctccggtatggcctttcatataaagctcccataagggagctttttttcttccgcctgcctgagtctgtcttccgtttttcctgagtccgccgctcttccgggccttagggcgtgttccggtccgggcggtgctttccggcgggtcggacggagtgcatgcgccctgttcggccgattttccggtttcgaatgtaaaatttgttatttcgattagtaacctgtcttgtgaaattgtattatttatagaaacaaaggcgcagaacgggatgcattcccgtctgcggttgcaaaaagttttactatctttgcatcaattctaaccttaacctgaaaagaaccgatgtctgcaaattcccgaaaagtatcgccgctggcatgggtccccacggtctattttgccatggggctcccgtttattatcgtaaacatggtagcgacgctgatgttccgagggctgggtatcgacgatgcccgcattacgctctggacttcgctgattatcctgccgtggtcgctcaaacccttctggagtcccttgatggagatgttcaggaccaagaaattctgggtcgtcgccacgcagctggtttcgggtctgggacttgcgctggtcgccctgtcgcttccgcttcccaactttttcccctatgccatcgccctgatggccgtcgtggccttcagcggcgcgacgcacgacatcgccaccgacggcgtctatatcaccgaactttccaaagacctgcaggccaagttcatcggctggcagggcgccttttacaacatcgctaaggtcttcgccatgggcggactggtctatctggccggcgcgctcaaggaccatgtcggaatcgtgcaggcgtggatgaccgtgatgggcctttgcggcggcattctcttcctgctgggactgtaccacatccgcatgctgccttcgggtggcgccgcgacggcccatgctgacagtttcggcggcgccatgcgcgaaacgaaacgcatctttctggagttcttcaagaagaaatacatctggatctatttcgccttcatcctcttctaccgcttcgccgaaggtctggtcatcaagatcgtgccgctgttcctcaacgctccgctcgatcagcagggcatgggccttaccgaacagcagatcggactctattacggtacgttcggcgtgatcgccttcgtcgtggggtccattctgggcggctatttcatttcgtggctcaaactgcggcgcgccttgttcccgctggtctgcatcttcaacgttccgttcgtggtctatgcgctgctggcgtggttccagccttcgagccccgtgctgatctgcgcggccatcgtgttcgaatatttcagttacggcttcggcttcgtgggactcacgctcttcatcatgcagcaggtggcgcccggcccgcaccagatggcgcactacgccttcgggtcgtcgcttgccaacctcggcgtgatgcttccgggtatgatcagcggctggctttgtgacagtttgggcggctatcactacttcttcatgtgggcgctgctggcgacggttcccgccttcctgctcgccgcgcgcattcccttcacccatcccgataccgaagaggtgacggccgaggagatcgacaaagaattgatcaacgaataaacagataacgtaaaactatggacaacaacctgaaaatcgtaggcccggccatgccggatatgccgtgggaggatcgtcccgccggctccaaggaagtgatgtggcgctattcggccaatccgatcatcccgcgcgacgcgctttcgacgtcgaacagcattttcaactcggcggtcattcccttcaagaaaggcaagtataactatgcgggcgttttccgctgcgacgacaccaaccgccgcatgcgcatccacgccgctttctcggtggacggcatcaagtgggatatctgcgaggaggatttcaaactcgtgggcgccgatcccgaaatcgccgagtgggtttacggttacgatccccgcgtagccaagatcgaggataagtattatgtgacgtggtgcaacggctaccacggcccgacgatcggcatcgcgtggaccgacgacttcgagacgttccaccagctggagaacgcctttatccccttcaaccgcaacggcgtgctgttcccccgcaagatcaacggccgtttcgccatgctgtcgcgtccgagcgacaacggccatacggctttcggcgacattttctactcggagtcgcccgacatggagttctggggccgccaccgtcatgtgatgtcgcccgcggccttcgaggtgtcggcatggcagtgcatgaagatcggtgcgggtcccgtacccatcgagacgagcgagggctggctgctgctctaccacggcgtgctgcgttcgtgcaacggttatgtctatgcgttcggttcggcgctgctcgacctcgaccagccgtggaagacgatcgcccgcagcggcccgtacctgatttcgccgcgcgagatctacgagctgacgggcgacgttccgaacgtcacgttcccctgcgcgtcgctccatgaccccgaaacgggccggatcgccgtctattacggatgcgccgacaccgtcacgggccttgccttcggttatatccccgaaatcgtcaagtttaccaaggaaaacaatattctctgacgatgctgcgacgaacgctcttaactgctgcgctcgccgcagccgttttctgcgcaccgctgcgtgcgcaggaacccgccgactgggtcgatcctttcgtcggcacgaccaacttcggcacgaccaaccccggcgcggtgtgtcccaacggcatgatgtccgtggttcccttcaacgtgatgggttccgacgagaacgtctacgacaaggacgcccgctggtggtccacgccctatgagttccacaacaagttcttcacgggtttcgcgcacgtcacgctgagcggcgtggggtgccccgaactgggatcgctgctggtgatgccgaccacgggcgcgctcgacgtcgattaccgcaattacggcagcaagtacaccggtgaaaccgcttctccgggctactattcgaaccggctttcgaagtacggcgtccttgccgaagtgacggccacgccgcgcagctcggccgaacgctacaccttcccggcgggcgagagccatatcctgctcaatctgggcgagggccttaccaacgaatcgggggcttgggtgcgccgcgtgagcgacaccgaggtcgagggcatgaaactgctcggcacgttctgctacaacccgcaggcggtgttcccgatctatttcgtgatgcgcgtctcgaaacgcccctccgccacgggattctggaagaaacagccccccaaatacggcgtcgaagccgagtgggacaaggatgccggcaattacaaactctatacgcactacggccgtgaactcgcgggcgacgatgtgggcgtgtggttcagctacgatacgacggagggcgagcagctcgaagtccgcatgggcgtttcgttcgtgtcggtcgagaatgcgcgcctgaacctcgaagccgagcagcaggagcgttcgttcgacgacatccgtgccgcggcgcgccgctcgtggaacgacgatctgggccgcatccgcgtcgagggcggcaccgacgcgcagaagaaggtcttctatacggggctctatcatgcgctgatccatcccaacgtgctgagcgacgtcaacggtgaataccccgcgatggagagcgccgaaatccgcaccgccgagggcaaccgctatacggtcttctcgctctgggacacctaccgcaacctgcaccagctgatgacgctggtctatcccgaacgccagttggaaatggtgcgttcgatgatcggcatgtacaaggagtggggctggctgccgaaatgggagctttacggccgcgaaaccttcaccatggagggcgatccggccatcccggtgatcgtcgatacgtggatgaagggcctgcgcgatttcgacatggacgccgcttacgaggcgatgcgcaagtcggccacgacgcccggcgcgcagaacaggatgcgccccgacatcgatccttatgtcgaaaagggctacgtgccgctgggcttctacgcccgcgacctttcgggcgacaactccgtatcgcacgcgctggaatactacatcgccgaccatgccctgtcgctgctggccgattcgctcggccgcagggaggacgcggcgctgttccggaaccgttcgctcggctataaaaactattacagtcccgaatcgggcactttccgtccgatcaccggggagggcggtttcctgacgccgttcgatccgcggcaaggcgagaatttcgagccggtccccggttttcacgaaggctcggcatggaactatacgttctatgtcccgcacgacgtctacggactgtcgaagctgatgggcggacggcgcaaattcatcgacaagctgcaaatggtcttcgacgaggggctttacgatcccgcgaacgaacccgacatcgcctatccctaccttttcagctatttccggggtgaggagtggcgtacgcagcgcgaggtgaaccgcctgctggccaaatacttcaccaccgcgcccgacggcattcccggcaacgacgatacgggaaccatgtcggcgtgggccgtcttctcgatgatgggcttctatcccgactgtccgggcgagccgtattacacgcttacctcgcccgttttcgatcgggtgaccattacgctagacaggaaatactatccggccggggaactcgtcatcgagacgaagcgtcccgattccggcgcggtctatatccgctcgatgacgctcggcggcaaaccgctgaagcgataccgcatcggccacgacgagctgctgcggggcggacggctgactttcgaacttcaaaaccgcaaatagatgagactcttccgctggatattcgttgtgtcgctgctgctcgtctcgtccggagtccgggcgcagacccggctgacccgcaacggcaaacctgcggcccggatcgtcgtggcgcagcaaactgccgccgatctcacggccgcgcagctgctgcagcgattcgtccgcgaatcgaccggtgcgacactgcccctgctgcatgacgtgacgccccgcaagggcgacatcctgatcggagcttcggataccgcgggacttgccgaggacggcttccgcctgcgtacgcaggacggcgtgctgcgcatcagcagcggcggcgacaagggggcggtttacggcgtcatgacactgctggaacgttacttggggctggattacttcgccgccggggtctatgacctcgaccggaatccgaccgtcacgcttccggcgatggacttcgccgaaaatccggcgttccgctatcgccagagtcagggctacggcatggcgcaggactccgtgtaccggctggccctgcgtctggaggagccgcgcgacatctttgccggcggcctgtgggtgcacaccttcaacagcctgcttccggcgtcggtctacggcgcggagcatcccgaatactactcgttcatcaacggcgaacgtcgtcccggccgcgccagccaatggtgtctcaccaacgacgaactcttcgaactggtggcggcgaaagtcgattcgatcttccgggccaaccccggcatgaacatcatctccataagccagaacgacagcaatttcacctactgccgctgcgaggagtgcgagaaggtcaaccggtacgaaggcgcgccttcgggcaactatatccgcttcctgaacaagctggcggagcgtttccccgacaaggagttttcgacgctggcctacctctttacgatgcagcccccgaagcacgtgaagccgctgcccaacgtcaatatcatgctgtgcgacatcgactgcgaccgcgaagtgccccttacggacaatgcgtcgggccgcgagttcatcgaagcgatggaggggtgggcggccctgtcggacaatatcttcgtgtgggattacggtatcaatttcgacaacatggtcgctccgttccccaactttccgatactcaaacccaacatcgggcttttccggcgcaaccacgccacgatgcacttctcgcagatcggcggctcgtacggcggcgatttctcggagatgcgcacctatgtggtcgccaagctgatgtggaatcccgatcaggataccgactcgctcatgctgcgtttcatgcgcggctattacggacccgctgcgccttatatttatcagtacgaaaaactgctcgaaggcgcattgctggcgggcggccagcggttgtggatatacgattctcccgtctcgcacaaggacggcatgctcaacgccgcctgccgcaagcgttacggagagctgttcgactgcgccgagcgggccgtggcgggggattccgtcctgctgcgccgcgtgcgcctgacgcgtctgccgctgatgtactccaacctcgaaatcgcccgcacgacggccgacaaggacctcggcgccgtggtgagcgagctggacgcgttcgagaaatacgtgacccaattcggcgtgaagacgctcaacgaacgcaacaacagcccgcaggaatactgccggctctaccgcgaacgttatcttcctgcggagaactccaatctggcgctgggcgcgcggatcgtctggatcgacgctcctgcggagaaataccgggcgtcgggcgaaaagaccctgaccgacggtcttttcggcggcgcgtcgttcgtcgagagctggacgggctgggagggcaaggacggcgccttcgtcgtcgatctgggccgcgacgtagccttctcgacggtcgagaccgatttcctgcaccagctgggccagtggattctgctgccccgttcggtgcgctactccgtttcgtccgacaacgcggactggaccccgttcgggcaggtggaatttcctgaggaccagtcggtgcccgtgaagttcgttccggctgccgtcacggccgcacagccggtgcgggcccgctatgtcaaagtcgaaatcgaaggcgtcaagacctgcccgccgtggcattacggcgtaggctgcccctgctggttcttcctcgacgaagtgaccgtgaaataaaacgttgcgaaaattttaaacgattgcataatgaaacccaagcatcttctttccttatccgttctgctgatttcggccgcctgttcgcagcctgagcagaagccgctgacgcagtatgtcgatatgtacatcggcacgggcggccacggccatgtcttcatgggggccaacgttccgttcggcgccgtgcagctcggccccaccagcatcccgcagtcgtgggactgggtgtcgggataccacatttccgatacgaccgtcatcggtttcagccatacccacctcaacggtacgggtatcggcgacctgttcgacgtcacggtgatgcctgtcgtgggcggggtgacctacgcccgcggcacggaggacgacccgcagtcggggctttggtcctatttcagccgtaagaacgaaaaagcccgtccgggctattacgccacgcggctcgaccgctacggcgtcgatgtggagctgaccgccaccaagcgtgtcgggctgcacaaatacaccttccccgcgtcgcaggaggccgccgtggtctttgacctcgaaaacggcggctgctgggacaaggccaccgagaccgcattcgtttccgacggactccggctcagcggttaccgctattcgacgggctgggccaaggatcagcgcgtttacttcacggccgaattctcgaagccggtgaagaatatctcctatcccgatgcgtcggagacggttccggaggagggcgacgttacggtcaagggccgttacgcccgcgtggagttcgatacgaccgacggcgagccgctctatatgaaagtggcgatttcgcccgtgagcatcgagaacgccaagctcaacatgcaggcggaacttcccggctgggacttcgaagccacggcggcggcggccgacaaggcgtggaacgccgagctgcagaaggtgcgtgtcgagactgcggacgaagccgcccgccgcatcttctatacggcgctctaccacacgatggtcgctccgtcggagttctgcgacgtgaacggcgactatcggggcgctgacggcgagatctaccgcgccgcgccgttcgtgaactatacgaccttctcgttgtgggacacctaccgcgctgcccagccgctgatgacgattctccatcctgagaagatgcccgacatcgccaatacgatgctccatatctacacgcagcagggcaagcttcccgtctggcacctcgcgggcaacgagaccgactgcatggtcggcaatcccggcattccggccatggccgacatcgtgctgaaaggttacggcggcttcgacaaggagctggcctacgaggcgctgaagaaatccgccatgctcggcgagcggggtatggacctgcgcatgaaatacggctatatcccctgcgacctcttcaacgaagcggtggcctacgacatggagtacgcgctggccgactgggccgtggctcaggtcgcggcgcagcgcggcgatacggccgattacgactatttcctcgatcgcagcaaatcctaccgccacttcttcgatcccgaaacccgcttcatgcgcgggctggattcgaaaggcggcttccgcacgcccttcaacccgttcgcttcgacccaccgcgaggacgactactgtgagggcaatgcgtggcagtatacgtggctcgtgccgcacgacgtcgaggggctgatcggctgcttcggcggcaaggaggctttcgtcgaaaaactcgactcgctcttcacggtcagctccgtgctggagggcgccgcttcgcccgacatttcgggcctgatcggtcagtacgcccacggcaacgaacccagccaccacgtcgtctacctctatacgatgatcggccagcccgcgaagaccgccgacaaggtgcgcgaaatcctgacgacgctctatcacgaccaacccgacggattgtcgggcaacgaggacgtcggccagatgtcggcgtggtacgtgctttcgtcgctgggattctatcaggtcgagccagccggaggacgctacttcttcggttcgccgctcttcgacaaggccgagctgcgcgtgcgcgacggcgtgttcaccgtgatcgcgcacaacaattcggcggctgacaaatacattcagcgcgtgaaactcaacggcgagccgtacgccaagccctatatcggtttcgaagagatcgccgcgggcggcacgctcgaattcgaaatgggaccggagcctgccgtatggtacgaactttaaacggaaatgacagcaatgaaaagtagaaatatctttttcgcggccctttgcgccgccgttttggccggctgttcgtgcccttcggccgggcagcgatcccctcagcgtccgtcggactatgtttcgacattggtaggctcgcagtcggatttcacgctttcgacgggcaatacctatcctgccgtcgctctgccttggggtatgaacttctggacgccccagaccggtaagatgggcgacggctgggcctatacctacggggcgcaccgaatccggggcttcaagcagacccatcagccctcgccgtggatcaacgactacggccagttcgcgctgatgcccgtgcgcgggaatgataagctggacgaagagtcccgcgcgagctggtattcgcaccaagccgaggtggcgaagccttactattacaaggtctatctggccgaccacgacatccgcgccgagatcgccccgaccgaacgtgccgcgatgatgcgcttcacctttcccgaaagcgacgagtcgggcgttgtgatcgacgccttcgaccgcggttcgcagatcggcatgctcgacgcccgcacgatcgtgggttacaccacgcgcaacagcgggggtgttcctgataatttccgaaattacttcgtcgtgcgtttcgatacgccgttcaccgccgtcgaactgaccgacgcccccggcgagtacgaacccggcagcagcttgctctatcctgacggcagcaagtcggtgacgggcggacacgccgtggcgaaggtgcacttcccgacccgccgcggccagcaggtctgcgccagcgtggcttcgtcgttcatctcgcccgaacaggccgttcagaatctcagggagctgggggccgacgacttcgagaccgtcaagtccaaggcgcaggagcgctgggacgaagtgctgggccgcatcgaggtcgagggcggcgccgaagagcagatgcgcaccttctattcgtgcctgtaccgttcggtgcttttcccgcgtaaattctatgaagtgaccgcttcgggcgaaatcatgcactacagcccctacaacggcgaagtgctgcccggctacatgtataccgacaccgggttctgggatacgttccgcagtctgttcccgctgctcaatctggtctatccttcggtgaacgccgaaatccagcagggactggccaacacggcccgcgaaagcggcttcctgcccgaatgggcctcgccgggccaccgcggctgcatggtgggcaacaactccgcatcggtggtggccgacgcgctcctcaagggcgtcacgcccgaaaaggagtggcagacgctctacgaggccatgatgcacgcgcgcacgaacgtccaccccggcgtctcctcgaccggacgtctggggcacgagtattacaaccggctgggatacattccctacgacgtgaagatcaacgagaatgtcgcccgcacgctcgaatacgcctacgacgactggtgtatcgcgcaggtggcccgcaaactgggtaagacggaggatgccgcggcgcttgaggaggcttcgcgcaactaccgcaacgtattcgacaagacgaccaagctgatgcgcggccgcaacgagaacggggagttccagtcgccgttcagcccctacaagtggggcgacgccttcaccgagggcaacgcatggcactacacatggtcggtgttccacgatgtgcagggacttgccgagctgatgggcggccgggaaggattcgccgaaatgctcgactcggtgttcgtcgtgccgccgatctacgacgacagctattacgggacccgcattcacgagatcaccgagatgcaggtggccgacatgggcaactacgcccacggcaaccagcctgcgcagcatatgatctacctgtacaactatgcgggccagccgtggaaggcgcagtactggacgcgcgaggtgatggaccgtctctattcgtccaagcccgacggctactgcggcgacgaggacaacggccagacctccgcgtggtatgtcttctcggccatgggattctatcccgtatgtccggcttcggaccagtacgtcatagggtcgcccctgtttcgcaaggcgaccgtgaaactggagaacggaaagaagatcgtgatcgaggctccggacaacgctcccgaaaaccgctatatcggaaccatgaagctcgacgggaagcgatacgaccgcaacttcatccgctggtcggacctcgtaaaaggcgcgaaaatagacttcgcgatgcagcccgatccggcgtacaaacggggtgtcggcccgcaggacgcgccctattcgctcagccgtgaagaatgtcgataatttgtcaatagaatctgactttcggttttgaaaattggccggaaaatactacttttgtagcgttgtttttacaattgttaggttaatccggacatatctcatgacctccacaggcaaaatcgatcaacgcgaacgaaagaaacagcagggccaagccgctgcattctattcgtcgtgccgacagcagggtcagagcgcgcagtcgcaggggcagcaaatgtcctgcagcgggatgcgcggatagataccagaccgccatgacatgcgatgtcgtggcggtctgcttttttgaaaaaacttaaaaccaaaggatatgaaggtcggtgtgattatgggctcggtgagcgattacgaggtgatggccgacgccgtcgccacgctcgaacaattcggtgtcgatttcgaaaagcgcgtcgtaagcgcccaccggacgcccgatctgttgtgcgagtatgccaagacggccaaggcgcgcggtatcggcgtgatcatcgccggtgcgggcggcgcggcgcatctgcccggcatggtggcttcgatgacgacgctgcccgtggtgggcgttccggtcaagtcgcgcgccctgaacgggctggactcgctgttgtcgatcgtgcagatgcccgcgggcgttcccgtggccaccacggcgatcaacggttcgaagaatgcggcgctgatcgccgtctcgattctcgctttgcaggatgcggaactcgcggcccggctcgaagcgttccgcgccaaacagaccgccgacgtacttaaagcggaactttagatgaagacgatcggcatcataggcggcggccagctggggctgatgattatcgaacaggcgcacctgctcggtgcgcgcacggtgtgtctcgatcctgcggcggacgctccggcctttgcgctcagtgacgagcggatcgtggcggcgtatgacgaccccgcggcgctggaggagctttgccgccgcagcgacgcggtgacctacgagttcgagaacgtgccgggcagcgtgctgattccgcttgagaagagatacaacatcccgcagggcttccgtccgttgtacgattcgcaggaccgcctgcgcgagaaggacaacgcccgtgccggcgggctggcgacgcccgaatacgccgccgcggacgacgaagcgtcgctgcgtgccgccgtggcgaagatcggcctgcccgccgtgctgaagacccggacgctggggtacgacggtcacggacagctggtgctgaagaccgaggccgacatcgagaaggctttgccgatgctcgccgtgccctgtattctggagcagttcgtgcccttcgatttcgaagccagcgtcgtgctggtctccgacggcagccatgtcgtcacctttccgatcggtcgcaacatccaccgcgacggcatcctcgatttgtgcttcgtgcccgcggaggagatggacgacgagctgcgcggacggatgatcgccgccggcgagcggtttatgctgacgtgcggttaccggggaattctggcgatcgagtttttcgtgaagggccgcgaattcttcttcaacgaaatggcgccgcgcccccacaattcgggacactatacgatcgaaggctgtacgaccaaccagttccgcgagttggtgcgcttccttttgggagagccgctgcaggagccgcggctggtggcgccgaccgtgatgaagaatatcttgggacaggacctcgaagcggccgaagcgatcgccgccgaaaaccgtccgggcgtgcatgtccgtctctacggcaagaccgagagccggccgaagcgcaagatgggacacattaccttcgtgggcatgactccggcggaatacggggccgtctgggccgaccggtttgtgaaatagcggggccggtcccgcatgcgtcgccgcaggcggacgggaggagtttccggaagcggcggcgaggacgaagaccggcggaacggtcggtaaggaccgcagaaacgaatgaagaatattaaacgatataggatgaaaaactaccggatttttgttgaaaaacatccccgtttccgggtcgaggccgaaagcctgcgccgggaactgaacgccaacctgaacctcgatatccgcgaactgcggctgctgaacgtttacgatctgttcggcttttcggaggaattgctcgaaaagacccgctacagcgtcttcggcgaagtggtgaccgacagcgtgaccgatgcgtgcgaccttgcggggcagaagtatatcgccgtggagtatcttcccggccagttcgaccagcgcgccgcgtcggccgtggactgcgttcggctgatcgacccgtcggccgaggtgcgcatccgttcgtcgaagctgctgctgttcgacggcgcggtgaccgacgaggagatcgcgcggatcaaacgctactatatcaatgccgtcgagtcgcgtgaaaaggacctgagcgtactcagcgacatggagcaggccgaggtgaagcccgtcgccgtgctcgaaggcttcacgaagatgaccgacgccgagctggcgccctactgcgcgcagtacggactggcgatgaacgccgacgatctgcgcgaggtggtgaagtatttccgcgccgagggccgcgatccctatgaaaccgaactgcgcatcctcgatacctattggagcgaccattgccgccatacgaccttcacgaccgagctggagggaattacggtcgaggagtcgttcgtcaaggacgaaatcgaagattcgctggccctctacctgcgcatccggcgtgagctgggccgcgaacacaagagcatctgcctgatggacatggccacgatcggcgcccgctacctgcgcaagaaggggctgctggacgatatggaggtgagcgacgaaaacaacgcctgctcggtctatgtcgatgtcgacgtggacggccggaccgagaagtggctgctgcagttcaagaacgaaacccacaaccatccgaccgagatcgagccgttcggcggcgcttcgacctgtctgggcggcgctatccgcgacccgctgtcaggccgcagctacgtctatcaggcgatgcgcgtgacgggggcgggcgacatctaccagaaggtgggcgacacgctcgaaggcaaactcccgcagagcgtgatttcgaaaaaggccgcggccggttattcgagctacggcaaccagatcggtctggccacgacccacgtacgcgaggtgtaccacgacggctatgtggccaagcgtctcgaagtgggcgccgtggtgggcgccgtgaaggcggagaacgtccgccgcgagaaacccgctccgggcgacaagatcatcatgctgggcggccgtacgggccgcgacggcatcggcggagctaccggatcgtcgaaagaacacaacaccaagtcgctggagacctgcggcagcgaggtgcagaagggcaacgctccggaggagcgcaagctcgaacgtctgttccgccgtccggaggtgacgcggctcatcaagaaatcgaacgacttcggcgcgggcggcgtcagcgtcgccatcggcgagctggccgacgggctggacatttacctcgaccgcgtgaagaccaagtacagcggcctgaactccacggagctggccatcagcgagtcgcaggagcgcatggcggtagtcgtcgaagcgaaggacgtcgagacgttcatgcgctactgtctcgaagagaatatcgaagccgtcgaggtggccgacgtgaccgacacggcccgtatgcggatgttcaacaaggaccgcaaggtcgtggacctctcgcgcgagttcatcgacagcgccggcgcccggcattatgccgaagcgaaggtcggcgaggtggaaaaccgcaatccgttcgtacgtgaaatcgccggcgatacgcttgccgcgcgttttgagaataacctgaaagataacaatgtcgtttcccagcggggacttgtcgagatgttcgactcgacgatcggcgcctcgaccgtactgatgcccttcggcggccgtacgcagggcagtgagacgcaggtctcggtgcagaagcttccgaccgacggctgcaccgacacggccagcatcatggccttcggttacaatcccttcatcgcttcgtggagcccctaccacggcgcggcctatgccgtggtggaagctgcggcgaaggtcgtggcggcgggtgcgcgctacgacaggatgcgttactcgtatcaggagtatttcgagcgcatgaccaagaatcccgaatcgtggggcaagcctctcggcgcactgctcggcgcgctgaagatgcaggtcgagctgggactcccgtcgatcggcggcaaggactcgatgagcggcacgttccagcatatcaacgtcccgccgatgctgatggctttcggcatcacgacggtcgacgccggaacggtcatctcgaccgacttcaagaaggccggcagccgcatctacctcgtgcgccataccccgaaggagaattacatgcccgacacggcgcagctgaaggccaacttcggtttcgtgagcgggcagatcgagagcgggaagatactttcggcatggtccgtcggattcggcggcgtggccgagggccttgcgaagatggctttcggcaaccggatcggcgccgaggtgacgacggacgaaagcaggctttacgaatacgcctacggttcgattctcgtggagagcgacggcgaactggacttcccggcggccgaactgctgggtgcgaccgtcgccgacgaagccctgaccgtgaacggcgtacggatgccgctcgacgggttgtacgaagccaataccgtgaaattcacgacggtttaccccgacaagggcgagaaccgtgccgacgtgatgagcgccgaacccgaacgccgcacctttgcctatgagggcgaagccgtcgagcgtccggtggcctacctgcccgtattccccggcacgaactgcgattacgatacggccaaggcgttccgcaacgcgggagccgaggtgacgaccagcgtattgtgcaatctgggcggcgacgacatcctgcgctcgatcgcccagatgaaggagcatatccgccgcgcccatattttcgtgctttgcggcggcttctcgtcgggcgacgagccggacggcagcgcgaagtttatcgtgaacgtacttaacaacaaggatatacgcgaggaaattcacgcgttgcttgaccgcggcggccttatcctcggcatctgcaacggttttcaggcgctggtcaagtcgggactgctgccgtacggccgtttgggcatggtgacgaaggattccccgacgctgttccgcaacgacgtcaaccggcatatctcgcagatcgtctcgacgcgcgtctcgacgctcaactccccgtggctcgcgggcttcgaactgggcgaggtgcactcgatcgccgtcagccacggcgagggcaagttcgtcgtcagcgaggagctggccaaggagcttttcgccaacgggcaggtggccttccagtacgtcgatgccgaaggccgcgtgacggccgaggcgccctacaaccccaacggctcgtcgtacgccatcgaaggcatcgtatcgcgcgacggccggattctgggcaagatgggccatacggagcgttacgggaagaaccttttcaagaatatcgccggcaacaaggagcaggcgctgttccgcaatgccgtcgagtatttccgcaaatcgaaatagtgtaaaccgaaaccatatgcctatgaagacctctttttatcgttttgcggcgctcctgctttttgcggcggcgctgagcgcaggatgcggcgagcggacggacgacatgcgtctgctctattggaatattcagaacggcatgtggtcggaccagagcaacggctacgacaatttcgtggcgtgggtcaaaggctacgatcccgacgtatgcgtgtggtgcgaggcccagtcgatctataagtcgggtacggcggagaggatggattccgtcgatcgctacctgacggctaactggggcgaactggcggcccgttacggtcataaatactggtatgtgggcggccaccgcgacaatttcccgcaggtcgttacgtcgaagtatccgatcgagaacgtgcagcggatcgtcggccaagctcccgacagcatcgtttcgcacggcgcgggctgggcccggatcgtgaagaacggcaggccggtcaatatcgtgacgctccatacgtggccgcaggcgtatgcctttcaggccgtggaccgcgacgccagcagggccgaacacggcggtgaccgttaccggcgcatggagatcgagtatatctgctcgcatacgatcgctacgcagtccgacgccggacagcagttgtggatgatgatgggcgacttcaattcgcgctcgcgcctcgacaaccgggtttacaactatcccgacgacgacacgcgcctgctggtgcatgattatatcgcggagcatacgccctatgtcgacgtgatcgcggagaagcaccccggcgaattccataccacgacccacgggcagagccgcatcgacttcgtctactgcacgccgccgctctgcgaacggatcacccgtgccgaggtgattgcggacgacttcaccgagccggtgcgcgatccgggcaagttgtcgaacttctaccacccctcggaccaccgtccgattctggtggactttgatatgaaatagaacgaatcaacaaataaacttaaaaaacacaaacatcatgaaacagctcgaaatgctctacgagggcaaggcaaaacaggttttccgcaccgacgatcccgaaaagatcatcattcactacaaggatgcggcgacggctttcaacaacatcaagaaggctacgatcgagaacaagggcgtgctgaacaacgccatctcgaccctgattttcaaagagcttcagaaggcgggcatcaagacgcactacatcgagacgatcaacgaccgcgaccagatctgccgcaaggtgacgatcattccgctggaggtgatcgtgcgcaacatcatcgcaggctcgatggcccagcgtctgggcatcgaggagggcacgcagccgtcgaacaccatttacgacatctgctacaagaaggacgaactgggcgacccgctgatcaacgaccaccacgccgtagcgctgggcgccgtgacctacgacgagctggatctgatttacgccatgacttcgcgcatcaacgaagtgctgcggaacatgttcgccaagatgaacatcaacctcgtggacttcaagatcgagttcggccgcacgtcggacggcgagatcgtcctcgccgacgaggtgtcgcccgacacctgccgtctgtgggacatgtccaccaacgagaaactcgataaggaccgtttccgccgcgatctgggcaaggtgcgcgaggcttacgaggagattcttgcccgtctgcagaaaatcgtggagtaatggcgatgcggcagattagcgaccgggagttgcatgaggagtgcggtgtgttcggcgtcttcggggtgcccgacgctgcatcgctgagctattacggcctgcatgcactgcagcaccgcggacaggagggcgcgggtatcgtggccgtcgacgaagggggaattttccgccgcatcaagggcagcggactggtgaccgaggtgttcgacgaggcgaaactggcgacgctcaagggaaatacggccatcggccatgtgcgctatacgaccgccggaggcggcggcatcgagaacgtgcagccgtttctgttccgtcacaacacgggcgatttcgcgctggcccacaacggcaacatcgtcaattcggccctgttgcgcgagtatctggagaacaagggcagcctgttccagtccacgtcggacagcgagattctggcccacctgatcaagaaggagacccgctaccacgaccggccgcgcatcttttcgatcatcgatgcgctgaacatgctggagggggcgttcgcgttcctgatcatgaccgccaaccgcatttacgcctgccgggacaaatacggcctgcgtccgctggccatcggccggctgggcgacggctatgtcgtgtcgagcgaaacctgcgcgttcgacgtgctgggtgccgagttcgtgcgcgacgtcgagccgggcgagatcgtgacgatcgacaggcagggtatccgcagccgcgactactcgatgtacaagcgctgcgagatgtgctcgatggagtatatctacttcgcccgtccggacagcgacatcgacggctgcaacgtccacgcctaccgcaaggagtcggggcgtctgctcttcaaggagtcgccggccgatgcggatatcgtggtcggtgttcccgattcgagcctcagcgcagcgatgggctacgccgaagcgagcggcctgccgtacgaaatgggactcatcaagaacaagtatatcggccgtacgtttatccagccctcgcaggagctgcgcgagaagggtgtgcggatgaagctttcggccgtgcgcagcatcgtcaagggcaagcgcgtcgtgctggtggacgactcgatcgtgcgcggcaccacttcgcgccgcatcgtcacgatgctcaaggaggccggggcgacggaggtgcatgtgcgcatcgccagtccgcagatgacacatccgtgtttttacggcgtggacacttcgacgcgcgacgagctgatttcggcccgcaaggacctcgaaggcgtacgcgaggagatttgcgccgattcgctggcgttcctgacgcccggcgcgctgctcaaggccggcaaccgcaaggagctttgcatggcctgcttcacgggcgagtatcccacggcgctgtaccagtcggtcgatgaggcgaacaaagatgtaaaatgttaagtaaaccattcaagtagactataatggcacagagttatgagaaggccggcgtaaacctcgaagccggatacgaagtggtgcggcgtatcaagaagcacgtcgcgtcgacctcgcgtttgggcgtgatgggcaatatcggcgccttcggcggcatgttcgacctttcggcgctgaacgtgaaggagccggtgctggtgagcggcaccgacggcgtgggcaccaagctcaagctggcgttcgagatggacaagcacgacacgatcggcgtcgatgccgtggccatgtgcgtgaacgacgtgctggcgcagggcgcggaaccgctggtgttcctcgattacgtggccgtgggccacaacgagccgaagaagatcgaagccatcgtcagcggcgtggccgaaggctgccgtcaggccggctgcgcgctggtgggcggcgagacggccgagatgccgggcatgtatgcgcagggcgagtatgacatcgcgggctttacggtcggcgtggtcgagaagtcgaaactgatcgacggctcgaaggtcaaggcgggcgacgtgctggtcggcatcgcgtcgagcggcgtgcactccaacggtttcagccttgtgcgcaagatcgtcgccgacaactgcttcgacctgcacgaggtatatcccgaactgtcgaacaaactgctgggcgaggtgctgctgactccgaccaaaatctatgtcaagcaggtgttggaggtgatccgcaactgcgacgtacacggcatcagccacatcacgggcggcggattcgacgagaatattccccgcatcctgcacgacgggcagggactcgaaatcgatgagggcgcatgggagattctgcccgtgttccgcttcctcgaaaagtacggcaaggtggcgcaccgcgagatgttcaacatcttcaacatgggtatcggcatggtcatcgccctcgatgcgtcggaggcggacaaggccatcggcatcctgaccgcgcagggcgaaaaggcctcggtgataggacgtgtaaccgacgccgaaggtgtcgtaatccgctaaggccgtgcgacgcctcgcagtcttcgccagcggcagcggcaccaacttcgaagccatcgtctcggcctgcgagcagggcgtgaccgggggcgaggtggtgctcatggtttgcgacaaacccggagcgcgggttgtcgaacgcgctgccgcgcacggtgtcgaaacgtttgtcttcgcgccgaaggagtacgcttcgaaggccgattacgaacgtgaaatcgtgcggctgctcgatgccgcgggcgtggaactggtttgtctggcggggtatatgcgcatcgtcggtgacgtgttgctggaggcttacggaggacggatcgtcaatatccatccctcgctgctgccggcgttccgcggagcgcatgccatcgaacaggcgatggaatacggcgtcaaggtgttcggggtgacgatccactatgtcgatgcgtcgctcgacggcggacggatcatcgcccagcgggccttcgagtacgacggtgatgacatcgaagagctggaagcccggattcatgcggtggaatatccgctttacgtagaaacgataaaaaaactgctcgatccatgagtgtcgcattcaatacgctcgaatcgctcgtcgaccggcaggccgtcgcctttatcggctcggtcgatgccgagggtttccccaatatgaaggccatgctcgcaccgcgcgtacgggaggggcttgaggtcttctactttacgaccaacacctcgtcgatgcgtgcggcgcaataccgccgcaatcccaaggcggccgtctatttctgcgacggggcttctttcgaggggctgatgctccgcgggacgatggaggtgctggaggacgctgccagccggcggctgatctggcgcgagggcgatacggagtattatccgcagagcgtggacgatccggactacagcgtactgcggtttacggccgtggaaggcaggtattacagtaattttcattcggaaaatatcgaaataaaatagtaacagatgagagcattgataagtgtcagcgacaaaacgggtgtcgttgatttcgccaagggcctgcgtgccttgggctgggaggtgatcgccacgggcggcacgatgaaactgctggccgacagcggtgtcgaggttatcaacatcagcgacgtgacgggatttcccgaaatctgcgacggccgcgtcaagaccctgcaccccaacgtgcacggcggcctgctggcccgccgcgacgatcccgaacacctgaaagcgctgaaggagaacaagatcgagtttatcgacatggtctgcgtgaacctctatccgttccgggagacgatctcgaagcccgacgtgaagatggaggacgccatcgagaatatcgatatcggcggtccctcgatgctgcgttcggcggccaagaactgggccgacgtgacggtggtctgcgaccctgcggactatgcgcagattctcgacgaaatccgcgccggcggcaataccgagaaggttacgcgcctgaagctttcggccaaggcctatacccataccgccgagtacgattcgatgatcgcgacctacatgcgtgcgcaggccggactcaatgagaagctgtttctcgaattcgacctcgtgcagtcgctgcgttacggcgagaacccgcaccagtcggcccgattctaccgcgaggagaaaaaggttccctattcgctggcttttgccaagcagctcaacggcaaggagttgtcgtacaacaatatccaggatgccaacgccgcgctgtgcatcgtgcgtgagttcgacaagcccttctgcgtgggtctgaagcatatgaatccctgcggcgcggcggtaggaaaggatgtcgtggaggcgtggaccaaggcctatgaagccgacaaggtgtcgattttcggcggtatcgtggcgacgaaccgcaccgttacgaaggaggcggccgagttgatgaagccgattttcctcgaaatcatcatggctcccaaattcgacgagggcgcgctcgaagtgctttgcacgaagaaaaacctgcggctgctggaggtcgatatggagcagggcgccgtcggacagaagcagtatgtcagcgtgaacggcggtctgttggtgcaggacctcgacgtggagacgaagagcgtgacggccgatatgtgcgtgacggcggcgaaacccgcagcggagcagatggacgacatgaacttcggctggcatatcgtcaagcatgtgaagtcgaacgccatcgtggtcgtgaaggacggccggacgctgggcgtcggcgcaggccagatgaaccgcatcggttcggccgagatcgccctcaaacaggcgcatgccgcgggcgttaccgaagggctggtgctggcttcggacggcttcttccccttcgacgactgcgtgacgctggccgccgaatacggcgtgacggcgatcgtgcagccgggcggttcggtgcgcgacgaagattcggtcaagaaggccgacgagaagggcatcgccatggtatttacgggcgaaaggcatttcaagcactagcagagctttagtgcttgaccatgcggcgaactatattgataatcctcctgaatccccctttgaaaagggggactttggataaagattgtcaggtttgtcgcttgattcatctgtgaaaaaacatggatatttttgaaatttctttgaaagaacggataaaataaacggatatgaaagttctggtaataggcggcggcggccgtgaacatgcgatcgtagacgccctcgcacgctcggcgcaggtggagaaaatctggtgcgcccccggcaatgcgggcattgcggcgcaggccgagtgcgtggcgatcaaggagaccgaggtggagagactgcgcgacttcgcagcggccaacgaaatcggccttacggtcgtggggccggaggtggcgctggcggcgggagtcgtcgatgcgttcaaggccgccgggctgcggatcttcggcccgacgaaagccgccgcgcggatcgaatcgagcaaggagttcgccaaggacctgatggccaaatacgctattccgacggcggggtaccgcgctttcacggagtatgccgaagcgttggattacgtggcttcgcgtccgcttccggcggtgttgaagtacgacgggctggcggccggcaagggcgtggtgatcgccgagacgctggaagaggccgacgccgcactgaaagacatgctgctcgacgacaagttcggcgaaggcaaggtcgtggtcgaggacttccttacgggacccgaattttcgttcatgtgcttcgtgtcgggccgcaaggtgtggccgatggcgctggcgcaggaccacaagcgcgccttcgacggcgacaaggggcccaacacgggcggtatgggggcctattccccgctgccgttcgttacggcggaggatgagcggtatgcgctcgaaaggatcctgcagccgacggccgatgcgatggtcgccgaagggtgtccgttcgaaggggtgctgtacggcggtctgatgaagactccgcaggggatcaaggtgatcgagttcaacgctcgtttcggcgatcccgaaaccgaggtcgtgctgccgcgcctgaagagcgatatcgtcgatatcttctgcgccgtgaccgacggagcggatacgcggctcgaatggcatgatttcgcgacgctgggcgtcgtactggcctcgaagggctatcccggctcctatgagaagggacacgagatcaagggactcgaccgggtcggaagcgctgtgtaccatatgggtacgaaggccgacggcggccgtattctgacggcgggcggccgtgtgctgttcgtcgtaggcaagggggcgacgctggccgaagcccgtgcgaatgcgttgaaggacgtggtgcagatcggatgcgacaatcttttttacaggaccgatatcggacactgggcatttgaaaaatagttggaaaatatgataatcagcggaaaagaactttcagcgaaacttaaggccgagatggccgccgaggtggcgacgttcggcgaaaaatacggccgggtgccccatctggtcgtgattctggtgggtgaagaccccggcagcgtgtcgtatgtgacgggtaaggccaaggcgtcggccgaggtggggattcgcaacacgacgatccgcaagccggagacgatttcggaagcggagctgctcggcattatcgccgaattgaatgccgacgcggaggtggacggtattctggtgcaactgcccctgccgaaacatatcgacgaggacaaggtgatcgaggcgatcgacaaggccaaggacgtggacggctttcatcccctgaacgtggcggctttgtggcagaaacagccctgcacgctcccctgcacgccgaagggcatcatcaagatgctgaaggccgcaggcgtcgggattgcgggcaaggaggccgtggtgatcggccgcagcaatatcgtggggcttcccgtgtcgaaactgctgctggatgagaatgctacggtgacgatgacgcacagccgcacgcgcaatctgccggaggtgacacgccgggccgatattctggtcgtggcgatcggccggccgaaattcgtaacggccgacatggtgcgtgaaggcgccgtggtgatcgacgtgggtgtaaaccgcgatcctgagaccgggaagttgtgcggcgacgtcgatttcgccgcagtcgagccgaaggcttcggtcatcacccccgtgccgggcggtgtggggccgatgacgatttgctgcctgatggagaatacgatcgagtgttttctgcggcggatgggccggaaatagatgatgaatgcctgaatcgggttttcccggtttgggacaagcattccgataagatagggtccgtggccggaccgaaatgccccgaagcgaaagcttcggggcatttgttttcctgcgggacaaactgcgtcttgcctttgccgttatctccgtgccgctgcgcagggattggtgtcgtgtgctgtgtgccgtgtgccgtgtgcggcggcggacggctttcgctgggttttgcgtgctgtctttatcctttttgctggtgttggtatacatttgcgtccacgggctgtccgttgtagtgcgacttggtatacaaaaaagtccttttgctgggctttagcggttcttgaggtacatctgcaggggattatgcttaccttcgaatgtcacaatgaacgaaattgtgtgtgcgaaattaaacaattcggatcggtgtgaataattgcgaccttttttgatagaacaataaggattgcccgcttaattcgtcctgcgagttgcagaccgtccggaaaatacgtacactaatttaaaaaaatctcaacaatgaaacgtttttatttggttgctgcccttgcagcgacagcgatggctgcggccttttttacttcgtgtgacaagcaggatgaagttacccccccccagcctgaaagcgcagcattaggattccagtcggttgttactgcagctctggaaacccgtgcggcaggcgatccgactccgctcaatgcctcgttcaaaatcaatctcgacaccaatgatgcttattccacggctgtaaataatcaggaagttaaatatacggttggcagcggctattcgatttctcccgcgatttatttgttgaaatcttcccggaatatggtcgcttgggctccggtcggcatcgaacccgatgccgaggctgctcccaatgtctttacgctgaatccggggaatacaactgcggccgtcgattttgtatatcaggagaatacggaggtgaattcaggtaagtgcacggatctggcattgactctgaaacacgcttttgcaaaactgacgtttacgttgaatgccacgaactacccgttcagtgcgccgagtctttcgtcgctcgtggtcaagggaactcccggagtctcgacaatagatatttcaaacggttcttattcgactgttacggatgccgacctgacggtggtcagtacggctactgactttacgagtccgaatgccgttacggcattggtccttcccaaagctgcagcttcgttgacactcgattgtacgctcgacgggactgcgtatcagaatatcgcagtcaaggatattgccaaattggatgccggcgcgaattataacattacgataaacataacgggaacggagatatcggtctccggcgtgcaggtcccggactggactgccggcggtaatggttcggcagatctgaaataaggggactggccgtttgccccgaccgtaaacatgaagggaactgtctgcaaggacagttccctttttattgtaagagccgttgtcggaatctgctccggatgcactattttttcttatagtaactgcattgcagcgtttcgggcatcggggccgaggcatcgcggcgccagaccatcgcaaggtccttcgacggatcgcccgtgccgaagtcgaagccgtccggcgaagcgaaggttacgggaattgcgccggagaatccgtatggggcgtagaatccgcgcagccattcctcgctggggatcagcagtgccgcgtcgtcgccgcgatcggcgatcagccgcatcgcttcgcccatcagcttgccggccagcccccggcggcggaattcgggagccgtcgccacgccgtagatataggtcgtgcggcccagctggctttcgaacggcagcaggtggagcatcgccgccgtgcggccttcgtattcggccgtgagcatgcggctgcggctgtagtagcgtatcaggaacgagtcgatgaactgttcgtcgtcgccgaaggccgcggtccacaactctttgcaggcgatttcgtcggggtgcaggtgtatggccgtgaatttgtgctggatgacggcggggtggtaggagagtttcgactggcgcagaccgtcgatgccgaggtcctcctcgcggttgatcagcgtgaagcgttcgggcagatgctcggcgaagagtttgttgatgatcgtgaaggctccgtcgtaatccgtgtcggccttttcgacgtgggtgtcgaacgtgtggtcgttgaccgccgagccgaacgtaaaggcgaccagcttgtcaccgacgtagatgcagccgcccagcatttccagctcctcgaagtggtcgaaggcccgctgcatggcccgctgttcggcgcagagttccgaggtgtgtccctcgtgcgcccggcgccattcgcgttcgagctgcatgcactccgcgaaacggtcgcgcgtcagattctcgtaccggaagtcggggtattcggacatgaagcggttgatgtggttgcgcttgggctggtagcggcgtcccgtcaggttgcgcaggtcttcggcgttgtagacgtagtcttccagtgcgcggtccgattcgaatgcgaaaagtcccgcgtgcatgttgcggatcatctcgcggccttcgtccgtcaggccgatcaggcgcagacgctgcccgtgggcgtgggcgtcttcgcgcagggcggggatgatgcccgcgaaatcgccctcgccgacgggctgcatgtagccgatcttctcgccgccgccgatgtggaagcggatgaccagaaagccgtcgatcacggcccatgcgctatggtacattgcctgccagcagtacatgttggcgaatgcgaggtcgcagttgaggatgcccgaaggcatggtatggcgctcgatgatctgtttgtcttcgaggcgtacgggtttgaattcaatcattgggggtgtaactcttgcgttcgatatggctgtaatactgctggatcagcgcccggaacgactgcatcaggctgtcggcggcgggggtgaccgggcactcctgaacctgcgctcccgaatcgtcgagcacgacggcgccttcgccggtcagcgcgcggaacttcccgtcgtacgacaccgaccagcgtggccgctcaggctcgttcagcacgtcgcgtccgaaggcgaaataaggttcctcgctgcccacgagacccagcaccgtgggcatgatgtcgagctgctgcactacgtcgccgacctcgccccgcagcgcgccgtcgggcgtgtacatgaagcctatgatgtggtagttgccggggtaggtgcgggtcacgggtgcgaatttttcggacgatacatgatcggccacgaatacaaaaaccgtgcggcggaaccactcttcgcggccgaaacgttcgaaaaagaggcggaatgcattgtcgtcgtaagccacgcccttgtggattttggtgtagccgtcgggcagcgtgtttacgtatcgggcgggtacgacgaacggatggtgcgacgagagggtgaagagcgtggcgaagaagggttccggagtttcggaaagctcctcgcccatgaattgcaggaacggttcgtcccagatgccccagtagccgtcgaaatcctctttgccgtgccgggcttcgtaatcctcgcggctgacgagccgctccacgccggccgaacgggcataggcgccgaaacccatcgagccgcgctccgaaccgcagaaaaacgccgtggcgtaacctttgtcgcgcaggatggccggcagctgccggctttcgcccaacgactgcggcatcagcacgaacggcgtcttgaacgacgggatgctgcccagcaccgaaggcatggcctgaatcgagcgggtgccgttggcatacatccgtttgaagcacaacccgctgcgcatcagcgagtcgaggaacggcgtgaaacctttggtctttcggtcggcatagatttcgggcatcaggtgcgccgaatgttcggccgacatgctctccataatgaaaatcacgacgttgcggcccgcgaggtttacggccgtgctgtccgccggctgatggaccggtgtgaagcggcgcggcagctcttcgggcgggaagaattttttatagctgacgccgcccgcactgccgatggtgcgcaggatgcagaacggattgctcagaatcaggttggccttgccgctgtccgcagtgtagagcgtggcgttggagagggtgatcggccgcgtcatgcgggtcatgccgccgcgcatgccggcgatgcagagtccggctgcgacgacgaaaatcgccgtgccgcccgcatagtagccccagccccggctcaggaggctctcctcgcgtatcttgcggccgtagccccacacgagcagggcggtcagggccgccgctgcgatgaccagataccagttttcggccatgaatttgccgaccagctgcaacgagttgccgttgtcggcgaagaagatttcatcggcggtgaaccgcttctgcgtgtagcggaaatagacgcagtcggccatattgaccgccacgaccagcacggcgtttacgacggcgtagtaccagaacagcagacggcggtaccacttgcgttcgcgcgcgtgcagaggcagcagcgagagcaatacgaacaccccgtcggcgtagacgaccgacgcggtgtcgaatttgagtgaacccgccagcagctgccccagctctccccagctcagcggtcccagcagctgcgcgttgtagagatagaaaatcacgcggcagagcatcagcaccgcgtaaagcagtgcaatgcgccgtagcagcatggccgtgggggtgtgcagcaggcgtttcatgttccggggtgttttcgtgcgcggttcgtgcgcgggctattcgcaggctttgagcgacatgtcgagcgacttgatctggtgcgtcagcgcgccgaccgagatgaaatcgacgccgcactcggcgtagtcgcgcatcgtgtcgagcgtgatgccgccgctggattcggtctcgcagcgtccggcgaccttcttcaccgcttcgcgtgtcatggcgggcgtgaagttgtcgaacatgatgcggtccgcgccgcctgcggcgaagacttcgtcgatgtcctccagcgaacgcacctcgcattcgatcggaatatccttgcccttggccttgaggtattcgcgggcgccgcagatcgccttgcggatgccgccggcaaagtcgatgtggttgtctttcagcaggatcatgtcgaaaagacccatgcggtggttttcaccgccgccgatcttcacggccatcttgtccagtacgcgcatgccgggcgtggtcttgcgggtgtcgaggactttggtgtgcagtccttcgagccgcgcgacgtaaacggcggtctgcgtcgctacgccgctcatgcgctgcatgatgttgaggatgatgcgctcggcctgcagcagcgaacgcaggcggcccgatacgtaaaacgccacgtcgccgggttttacgcggtcgccgtcgtgaagcacctgctcgaagtgcatgtcggggtcgagacggtcgaatacgatccgggcgatttcgatgccggcgatgatgccttcctgcttgcaaagcaggcgcatgcggccgtgttcgccggccgggatgcacgaaagcgacgtgtggtcgccgtcgccgatgtcttctttgatgcaaagctcgataagctcgtctacgaaaggtctgtattcgggtttcatgttcttatttgataagtgttccgttgaattcagctgtgtggttcaggtgataggtggggttggtgcaagtgaagaccaagtggaatttttctgcgttgtcggtcacttcgcatgcgaaattcgaaattacgtagtcttcgtaaggggcatcgtcgatttcggggatgattgcgcctgtgctttcgaaaatcgtcgatccgtcgtcgttgtggcgtgatagtttgggaaatacgatggtctttaccggttcacgcgggttgtcggtgaattttacattcttcatcgtcagcgcaacgctcttgtccggctgttcggtaaggttgcagattacgcccgaagtctggtttgtcacgtcgcctgccgtgtcggtgactttcagtgtgcaggtatatgaccctgagtcgggattgaagttttcgtcgtcgttgtcgcaggcggtgacggttgcggcagccagcaggaggaatagtaattttttcatgttgcgttatccgttttataagttaatgttcagtgtgatgccgaatgtgcgggggcgtccgcgctggacgaactcgttgccgatcgatttgaaatagaatacgtcgtaaccggcgtcggtgaggttgcggccccagacgctgagcgagtagcgggcgtgttcgaagcgtaccgaagcgtccgtaagcgcgtagaaaggttgtgaaagcgtattttcttcgttccaccagatgcggcccgcgcagcggacgccggcctgaaacaccagatcgccgagccatttcacgccggtcgggacggtccatgcggctccggccgaaagggtgagctgcggggcgtaggggatgcggttgtccttgtagctgatgcgcacgggatcgccgtcgtcgttctttacggtcgtttcgtaccggacaaaccgggcgtcggtgtagccgtacgcgaggttgatgtcgaaggtgcgccacggcgaaatctgaacggccgcttcggctccgagactgcgcgtgcgcccggcgttggtcatcatgcggccggtggtctgtcccggcggaaagacggtgagctgctggtcgcggcagtcgatgtagaacagtgcgaaatcgccccggaccgcgccctccatgcacgagaaatgcccgccgatctcgtagttccagctgtattcgggtttgtaggcgacgccccgctgcacgtcgtacacttcgccgatgcccatgcggttcatcatcttctgctggaggacgtcggaaaatatctgggtgttgaagccgcccgacttgtagcccttggcgatggtcaggtagaggttgcgcgtctcgtcgaaggagtacatgaccgagaatttgggcagcagctcggtaaaggtctgtttcaatgtgctgcggtcgtcgatgtctattggccgttcgtaggcagtctcgtttttgatgtgggttttggtgtaccacgtatccgtatagttgcggtaacgcaggcgggcgtgctcgaagtcgaagcgcaatcctgcggtgaagcgccagcgtcccagcgtatagttggattcgtggtagagggcgccgccagccgaaggcatgcggaaatcgctccccagaaagagctcgtcgccgcccgttccgtccttcagcccccagctgtagcggtagctctggtcgttttcgttggcgtatttgaggatcagctcctcgatgcccgtctgtttgaagtgcaccggggcgttcatcgtgccgtggcggtagaatccgaatgcccccagcagccagcggtaggctttgtccccgcgcgaacggaagacgaggtcctcagtcacgctatgctcggtacgggcctgcctgagcgtgaaatacgagaggggcaggaaatcctgatcgaggatcatctcgtcgtcggaatactggtagcacgtgatggaggcgacggtgaaattgccggcgtcgtagcggatcgtgagtccgtcgctcagggcggtgcggcggtaggagcaggggtcgttgtagcggatttccccgcggcggacgacggggcgtccgtcgtcgccgatgatgtcgtcgccgacataggcatagggatagccgccctgttcgagcaccgagaacgaaagcgtattgtcgatgcggagtcccgtgcggttgcgccactgggttttccagcgtccgccgcccagccgttcccagtcgcatttgtcgcccgtggcgagattctcgaagaatccgcccgtgtgggtataataacccgttacggccatgcccagatcgggcgtgagtttgtagtaggacgaggcgcggaacttgtagctgtcgccgctgccgtattcggcgctcaggcgcacgccctcgtacgagagcggcgagagggtgtagacgttgattacgccgcccatcgtattgcggccgtagagcgtgctctgcggtccgcggagtacttcgatgcgttcggcgtcggccagttccgtgtcgtaattgtccttgttgagaaccggtacgttgtcgatattgagtcccatgaccggctggtcgatgcgcgcaccgagtccccggacgtagatcgacgaggtcatgcgcgagccgtagtcgggggcgaagaagttggggacctgctgggagaggtgtttcagtgcgccgatgcgctcccgttcgatggcgcggctgccgacaatcgtcgccgcgacgggctgcgaccgcaggaccatgccctgcttgatggccgtcacctgcaccttgtccaccacgatcacggtatccgccgcggccggttcctccccggccgtgccggcgactgccgccgttgccgcggcatgccgttccggtgtctgtgctcccccggccgccgcgaggagcggaaggagtgtcagaagcggtatggtcagttgtctgaggtgcacggtaaagcgtttgattcggatgcaaagtaacggatttatttcggaagctgcaatcctaatttatgaggagggggcttcacagttcgccggcatcgacgtaaccggccgtcagggcgtagatggccagacccgccaccgagcggatacccagcttctccatgatgttgcggcggtgcgaaatgacggtcgtaagcccgatttgcaggctgttggcgatctgtttgttcatataaccgcgggcgatcagcgccagcacctcggcttcgcggcccgaaaggggcgcggcttcaggacgcaccgcgccgggaacgatgtgttcggaccggtgcgcgccgtggtgcatgcgcaggatgtcgcggacgatcgcctcctcgttggtgcagacgtcgatgcagtgcatgtccgcataagcaggctggggctgtccgctgcaaagcaggatcgttttgctgcgccgggcgcggaagaaactgccgtgcgtgacgaagagctgcgccgccacgaagaagtggaagaagcgttccgggtccgcttccgtgaaggattcgaagtcgccgaaaagttcgacgtcggcggcgggaatgatcttttcgagaatggatttcatcccgacgcccatcaggacgttgggcgctgcgacggctatggcgggacggcgctccatcggcttactcgtggtgatagggttcgttgttgagaatggtgaaggcgcggtagatctgctcggcgaagatcgcccgcacgatctggtgcgaaaaggtcatgcgcgaaagggacagacgggcgtcggagcgtttgtagacctcctccgagaatccgtaaggtccgccgatgaccagcaccagacgtttcacgccgctgttcatgcgtttctggagccaataggcgaattcgaccgaccgcatttcgtcgccccgctcgtcgagcagtacgacgtagtcgccgtccgacaactggcgcaggatcgcttcgccttcggccgtgcgctgctgtttgacgctgaggttcttggtgttgcggatgtcgggcagggcggtgaccgcgaatttgcagtagaagtttacgcgccgggcgtacatttcgaccagcgacgcgacctccttcgagtcggttttgcctatgactatcagttcgatgaccatttcttttcgtaaatcgtttccgcagtctgccgccgcatgccggaccgtgacttggttgccggtcgaagcgtttgccggagctgcgcgaaaggggggcggggcgtcgtagcccggccgggggtcggagccgtaaaaagcggattacaggtccgaattccattcgccgtcggcgtcggtgtagatcaccggccgcgatttctcgaccgacttgagccactcgtaagccttgtacatgttgtaaccgttgcccgattcgccgcccagcgcgaaggcgacgacgcaggtgtggttgcgcgagcggtagtacatcgccttgacccgttcgaggtattcgtcggccagcgcgggatcgttcgacggcgtgccgcccacacggcggtcgtcgcgcctgtcgggagcgttgatgttggcccggtcgatgacgtaaagaccgagttcgtcgcaaagttcgtagaaccacgccggctgcggatagtcggggcagacggtgttgctgcccttggatttgaggtttttcagctccgcgagggtgattttacggtctgcggcggcgttgtagcgggttttgacgagtttgatctccttgtcgaagcgggtgatgcggccgtcggtgaattcggtcttgccgaagccgatcttcagcggcatgtattcgcggtaagctccgtcgcggcgcgtgaagagcatgactttgtagagcggcggattcttggcgcccggttcccatttgttggcgttggtgccgtaaatgaaggggctgaagcgcaccgtgtcggtcgtgcggcccggaatcacgacttcgcggatgttgaagtcgagcagcttgccctgcggcgagtagatgtcgtaacccacggtgacgggttcgtcgtagttgaatgcgttctgggcgacgatggccagttcgagtacgccgaatttgcgggtggagtcggggacgagcgcgatttcgaagtcgcggatcgagcgtttgttctgggtgtataggtagctgttttcgaatgccttgcgcgacgccggggcggcgttgagcgcatcggccgcgctgcggcgcagagtcagcacgacggcgttcttgccttcgcggatgtagggcgtcagcgcgaattcggcgggcgtcgaggagtcttcgacctcggcgacctcggtgtcgttgaccgtgagcgtataggccgtgccgacgttttcgaggtggaggtacaccacgccgtcggtccagacgtagggaatgtctatcacctgtccgacggccaccgcgtcgtccgtggccgcgaacgcttcgggggtgtaggcgatataggcttcgacgcctgcgcggttgcgggcgtcggcgtcgtggcgcttgtcgtagggaacgacctcggtgcgctggatgcgtcccgcttcgaccggacgcgagagaatctcggtcgcgggcggctccttgatattgtagaggtcctgtgcccggatgcctgcggcgcagaggatcgccgccgtcagcagtatggtacgtttcatcgtgcgtgttcttatataggttaggcaaaggtactttttttttgtcaaatcgcaaataataggtatctttgtaaattcgaaaagaacgaataggagcattgataaataggagcattgataaaatgaaagatatgaaatcgcagagaatcgcagaaattctgaagtcgggtgccgaggacaccgacatcgtcgtcaaaggttgggtgcgcaccaagcgcggaaacaagaatgtggcgttcatcgccctcaatgacggatcgtgcgttgcgaatatccagatagtggtcgatcttgccaagttcggcgaagagcagctcaaacccatcaccacgggcgcctgcatccgtgtggacggacggctcgtggcgtcgctcggatcgggccagcgcgtcgaggtgcaggccgagaagatcgagatctacggcacggccgatccggagacctatcccctgcagaaaaaggggcattcgctggagttcctgcgcgacatcgcctatctgcgtccgcgcaccaataccttcggcgcggtgctgcgcatccggcacgccatggcctacgccattcacgaatatttcaacagggaggggttctattacttccacaccccgcttatcacggcttcggactgcgagggtgcaggcgccatgtttcaggtgacgacgctcgacctgaacgacgtgcccaagaatgagcagggacaggtcgatttctcgcaggacttcttcggcaaggcctgcaacctgaccgtgtcgggccagctcgaaggcgagctgggcgcgctgtcgctgggccgcatctacaccttcggtcccacgttccgcgccgagaattccaatactccgcgccatgcgtcggagttctggatgatcgagccggaggccgccttctatgagctggaggacaacatggagctggccgaggatttcctcaagtacctgatccggtatgcgctggacaactgcgccgaggacctcgaattcatgaacaagatgtgggacaacggactgctggaccgcctgcacttcgtgctggagaacgacttcaagcgtctcgactacaccgagggcatcgaaatactgaaggcttcgggccgcaagttcgaattcccctgcgactggggctgcgacctgcagtcggagcatgagcgttatctggtcgaggagcatttcaagcgtcccgtcatcctgatcaactatcccaaggacatcaaggccttctacatgaagcagaacgacgacggcaagaccgtacgcgctatggacgtattgttccccggaatcggcgaaatcatcggcggatcggagcgtgaggccgattatggcaagcttcatgcaagggtcgccgaattgggcatgaacgagaaggagctttggtggtatctcgacacccgccgctggggttcggctccgcattcgggcttcggtctgggcttcgaccggctgctgctcttcgtgacgggcatgaccaacatccgcgacgtgcagccgttcccgcgcacgccgaagaacgccgatttttaaaaccgcccggaaaggccgtttcacacctcatgctgccggacccgaacgaatttcttgttcgggctgtgcggggcaggcctagaaataggcgcctttccatacgatttacccggttgcggccgtttgtttactaaccgaaagaagaaaccaaattcagaacgaactattcttaatttggaaaaagtatggctattaatcagaaacaggtattatcgcttcagcagaagctctctccgcagcagattcagatgatcaagctcttggagctgcccaccgtgcagctcgaacaacgtatcaaacaggagattgaggacaacatcgtgctggaggaggaggaacatgcgtccgaagaggaggagcagccgcagcagatctccgtggacgagtatctgcgcgaagacgatacgccttcctataaaagccgcataaacaactattcgaaagacgacaaacagcgtccggttttcctgaccgaaggccgttcgctgcccgaatatctgcttgaacagctcggtttccgcaacctttcggagcgtgacatgcgtctggccgcctatctggtcgggagcatcgatgaggacggttacctgcgccgcgatctggaatccgtcgccgacgacatcgccttcacgctcggaatcgagacttcggccgaggagctggagcgcctgctcggagtcctgcacgaactggaaccggccggtatcggcgcccgcaacctgcgggagtgcctgctgctgcagatggcgcagattccgatcaacagccgcccccggcggctggcccgcaagattctgaccaactatttcgaagagttcgtcaagaagcattacgagaaactgatgtcgcgcctgcaggtgtcggaggaggatttccgcgaagcgatcgccgagatcaggcggctctcgcccaagcccggcaacctctatgccgagggcggcaccgacacgacgccctacatcattcccgattttatcctcgattatcaggacgggcggttccagctctcgctcaattcgtacaacgtccccgaagtccgcgtgaaccgtcgttatatggacatgatccgcgagatggtcggctccgacggcacggtccgcgagaaggacaaggaggcgattcagttcgtgaagaacaagatcgactcggccaaatggttcatctcggccatcaagcagcgtcacgacacgctgatgcgcacgatgcagaccattctcgactaccagcaggagtacttcaaggacggcgacaaatcgaaactgcggccgatgatcctcaaggacatcgccgaccgcacgggactcgacgtttcgacgatctcgcgcgtggtgaacagcaagtacgtgcagacccagttcggcatcatcctgctcaagtcgctcttctcggaggcgatgcagaccgagagcggcgaggaggtgtcgagctatgaaatcaaaaacatattgcaggagtgtatcgacgaggaggacaagcgccatccgctgacggatgagacgctgatggacattctcaactcgaaaggctaccggattgcccgccgcacggtggccaagtaccgcgaaatgctcggaatccccgtcgcccggcttcgcaaacagatatagatgaagaacagaaaaccggccgccggccgtttgcgccccgtgcggggacgttgcgggcggatacggaaccgatttgcgctgatccgccgggccgccccggaaggcggcggcaggtctgaggcagttgcggccggtgtgataatttgaagaatgtacagaaaactctcgaacggcatatcgtgggctttgcacccgtttctgctgcctctctacatgatcggcgtactgctgacgcttaccgtcttcgcgcattatccgtcgggcgtgaagatctacctgctgtgggtggtggcgctttatgccattatcatccccctgctggcgctgggggtgctacggtcgctgggccggatttcggattacaggatcgacgaccgccgcgagcggcttctgccactgctggtaggcgccgtgtgctatgtgctgtgcgccattacgatcgccaaaattccctccgccatcttcctgcgtaagttcatgatcgccgccgcctgctgcgaggtgatgtgtctggtggtgtcgctctattggaagatcagcctgcacctgacggcgatgggggccgtggtcgcattgctggtggtgatgaatatcgcgggcgtgggcgacatgatggttccgctgatgatcgccatactctgcgccggggcgctggcttcggcccgtctctatctggggtgtcacaacgggcagcaggtgctggccggattctgcggcgggttcgccgtcgcggcgctggccgtgctgtttctgtagtcggtgcggatctgaaataggaaagcccggagcattgctccgggctttttcgtatgcggactgcggatcagacgcatccctgcgccagcatggcgttggcgaccttcatgaagccgccgatgttggcgccgttgacgtagttgatgtagccgtcggcctgagttccgtactgcacgcagacggagtggatgttctgcatgatcgagcggagcttggcgtccacctcttcgggcgaccacgtgatgcgcatcgagttctgcgtcatttcgagacccgacgtcgccacgccgcctgcattggcggctttgcccggcgcgtagagcagcttgtgctgctggaagatgcggatggcgtcgggcgtcgagggcatgttggcgccttcggcgacgcagatgcagccgttgtcgacgagcgcctgcgcttcgtcgccgttcagctcgttctgcgtggcgcacggcatggcgatgtcgcacttgacgccccacggacgctggccggggtagtaggtcgccgaaggatagcggtcggcgtactccttgatacggccgcggaagatatttttcaattccattacatagtccagtttcgcggcgtcgatgccttcgggatcgtggatgtaacccgacgagtcggagagcgtcacgaccttggcgccgagctgcgtggctttctggcaggcgtactgcgccacgttgcccgaacccgaaatgcagacggtcttgccttcgaagctctctttgcgcgtggcgagcatctcctgcgcgaagtagcaggtgccgtagcccgtggcttcggggcgcagcgggctgccgccccagtcgcggcccttgccggtgagcgtgcccgtgaattcgtcgcgcagacgtttgtactggccgaacatgaagccgatttcacggccgccgacgccgatgtcgcccgccggaacgtcggtgtcctgtccgatgtgacgctgaagctcggtcatgaacgactggcagaacttcatcacttcgttgtccgaacggcccttggggttgaagtccgaaccgcctttgccgccgcccatgggcagggtcgtcaggctgttcttgaaggtctgttcgaaggcgaggaacttgaggatcgagagattgaccgaaggatggaagcggatgccgcccttgtaggggccgatggcactgttcatctgtacgcgatagccgcggttgatttcgatttcgcctttgtcgttgagccacggcacgcggaaaatgatgacgcgttcgggttcggcgatgcgctccagaactttcattttctgcaatacggggcttgccacgatgtggggtgccagcgattcggccacctcgcggacagcctgatggaattccggctcgttggggttgcggagggtgagttgcgccatgaaatcttcgacgtactgatgggcttgatcgttcatagtcaatctgtgttttgagggttattattcgagtaccgctgtaaaaataatgtatcttcgggagttttgcaagttctttaagaatttgctaaaatattttacttatgcgattttcagtttcagaccctcttgtgcttactgtctgcgggaagggacggaccgggggtgaaaatccgtaataaaaaatgacagatccgttgtgaatctgtcatttgaaaaaaaatgtaatttttttcgcctacttcgcattttctcccgcttggcggctgaattcgaagccgatgtagacgtttttgtagttttcgagcagcgcgacgatggtctccatcgacgatattttgctgcccatcgccttgaccatgtcgatgagtttggtgacggggaagaccagcagcagattagagccgtcgatgtaggcgtgccccggaaccgaacccagatcgagtttgtccttggcgaagctgagcgtggcgacatgcgtcgaagcgtcgaattcgtaggttcccgaaagttcgtatttgcccatcagggtggtgaatttgccgtctttggcgaatgtgaccgtatcggcgccgggtttgatgccggccatctggtagcccttgtcgagctgctgtttgatgttgtcctgaagtaccgtgccgccgagctggctcagcaggtcgttgccctcgaatttcacgcccggagcggtgtagttccatgtgccggtgagcgcatattgcgtcagcttgccgtcggtggccttgtctgcggcggtcgtggcggcttttttcaaggcttccttccagtcctgcgccgtggcggagcttccggcgagcaggagcgtcgcaatcgccagtaagagatttcttttcatgatcatttcaggtatttcagggtttcgagttctttgagccacacggccgccgaggcgtccgaaggcatgcgccagtcgccgcgcggcgagagcgccgcggagccgaccttcgggccgtcgggcatggccgaacgcttgaactgctgcgagaagaagcggcggaagaagaccgtcagccatttgaggatcgttgcgcggtcgtaactgccgtggaaggcctgctcggcgaggaacaggattttagccgggccgtagcctgcgcggatgaagttgtagaggaagaagtcgtggagttcgtagggacccacgaggtcctcggttttctgggcgatttttccctccttgtcggccgggagcagttcggggctgaccggggtgtcgatgacgtcgagcagcgtcgcgcgcgcggccatgtcggattccgtgtccgcgacccattgcacgaggtggcgcaccagtgttttgggcaccgaggcgttcacgccgtacatcgacatctggtcgccgttgtaggtggcccagcccagcgccagctcactcaggtcgcccgtgccgaccaccagaccgccctccatgttggcgacgtccatcagtatctgcgtgcgctcgcgggcctgactgttttcataggccgccgagcggtcttcgggatcgagtccgatgtcgctgaagtgctgcgagcaggcgtcgcggatcggaatttcgcggatcgtgacgcccagcccgcgcatcagttccagcgcgttgttgtaggtgcggtccgtggtgccgaagccgggcatggtgatgccgatgattccggcgcggtcgagtcccagcttgtcgaacgtgcggaccgtgacgagcagggccagcgtcgaatccagtccgcccgaaatgccgattacggccttttcgcagcgggtgtgcaccagccttttggccagcccgtgcgactgtatctggaaaatctcctcgcagcgttcgctgcggtgcgcttcgtcctgcggcacgaacggcatcgggtcgatgtcgcggtcgagcgccgcggcccggagcccttcggggacctccatttcgattacggagttctccgccgccccttcgtgcatgcggaacgaggtgttgcggcggcgttcgaattccagccgctgaatgtcgatatcggctacgacgagctgctcttcgagccggaagcgttccgattcgcggagtatccggccgttttcggcgacgatgccgttgccggcgaacaccagatcggtggacgattcgccgaagcctgccgagcagtagacgtatcccgcgagggtgcgggccgactgctgggccacgagctgacgcaggtaggcgtgcttgcccaccgattcgggcgacgccgagaggttgaagatcaccttggcgccgttgagcgcgaggtgcgacgaaggcggaatggcggtccagaggtcctcgcagatttcgacgccgaattccgtgccgttgatcccgaacgtgaggtccgcgccgaagtcggcgctctgctccgcgacggagatcgtctcttccgagattccggcgccggatgcgaaccagcggttttcgtagaactccgtatagtcggggatgtaggtcttgggtacgacgcccagcacacggccctgcgtgaaaacgacggcgcagttgtagagtgtcgagccgtggcgcaggggcgcgccggcgatgatgaccagcggcagtttgcgcgtggcttttaccagccgcgcaagggcttcgtcggccgcgtcgagcagcgccggctgcagcagcaggtcggcgcaggtgtaggccgtgacggccagttcgggaaacgcgacgatctcgacgccccgctgcacggcctcttcggccatcgcggcgatccgctcggtgttgaagtcgcagtcgccgacccgtacgtgcggcaccgctgccgccactttcagaaaaccgaaattatccataggtttgtatgttgttttgccgccgtcttcgctccggatccccgctttgcggcggggacggagatgcggcggattcgtcgcggcggcggtccggactgccgccgttgcggtcatatgtttattcggcccacaactgtgcgaggttcaggatcacctgctgggccttgcgcatcgtggtgagcgagcagtattcgaatttgccgtggaagttcatgccgcccgtgaagagattggggcaggggagtcccatgaacgagagccgtgcgccgtccgtgccgccgcgaatcgggcggacgagcggtttcacgccggcgcgctccatcgcttcgagcgccttgtcgatcacctgcggatgcggttcgaccatcttgcgcatgttgaagtactggtccttgacggtgagggtcagcacttcgtcgccgtatttctttttcagcagatcgacgcaggcccacatgaagaccttcttctgttcgaatttgtcggcgtcgtggtcgcggatgatgtagctgacggaagccttctcgaccgtgccgttcagtcccacgcagtggtagaatccctcgtacccttcggtatgttcggggcgctggcaggccggaaggaaacgctgcaggtcgcaggctacctcgatggcgttgatcatcttgtccttggcgtatccggggtggacgttgcggccttggatgtcgattttggcgctcgcggcgttgaagttctcgtactccagttcgccctccatgccgccgtccaccgtgtaggcgaagtcggcgccgaaagccttgacgtcgaagaaatccacgccccggcccacctcctcgtcgggcgtgaagccgatgcggattttgccgtgtttgatttcgggatgtgcgagcaggtactccgcggcggtcatgatctctgccacgcccgccttgtcgtcggcgccgagcagcgtcgtgccgtcggtgtggatcagcgtgtggcctttgaagaactccagttcggggaagtccgcgacccgcatcgtgagctggccgttcagcgcgatgtcgccgccgtcgtactcctcgatgatgcggggcttgacatccttgccgctcatgtcgggcgacgtgtccgcatgggcgatgaagccgatcacgggagcgttctcgcagcccggcgtcgcggggacggtgcccatcacgtagccgtatcggtccatcgtgacttcggtcatgccgagcgcctgcatttcgtcgcgcagggcggccagcaggactttctgtttctcggtcgaagggaacgtgccgctctcctcggacgactgcgtgtcgtaggagacgtatttcaggaatctttctttgaggtccatgatcttagcagtatggttatttttattcattattttgctctatcatatactcggcatattcatttccggtataatttttagacacgatgtaatcaaatattaaatcatcgtcgaattcaacagaaatagatgcttttgacgcatttcccacataacttgtataaaatgtaaaagcttttgaagaaccaggagaaagtgcgtcatatgtaatatagccatcatcatcggtaatcgcattcccatttctgtctttgtatactattttatatttgggttttgggatcgtgaatgttgatttattgatgcatatcccctgtccatttgctgaattaccgtaatatgatgtttcccaactccaatttttaatgaggacttttgattttagttctgaataaacattcacatattcattgaacatcattgcttttgctatgacaagttttttagctatttgttggtctgtcttgtctgccttattatcaatgcaacctgtttttacagcaaatttgaactcactattatcttcatatccacagaatccttcgctgtcgtaaataatatatttttttggatccgatggagacggttcaagatataatgtaatatctcgattaaatgattttccaaatccatttgtaaaattgttttcaattaatacggctatttttttgtcatttagtcgctttacttcattaattttaatattgtcggatttgtaatatgatggtaagtttgatgctgcgggatatatttcggtaattatgttgtccttatcattcttaatataggaaaataattcatttacagcgtttgttgccaattcttttctatttacacagctggaaaagaataaagaacaaatgatataaacaaggattatatgaaatcttttcattgtatattcacttaaatcattataaatttgagcaattaagacatcagagtatggaataagtccgagttcttgttattttatttgtatttattcctcttcctttgctttcagcgtgtgccagccgaagtagccgatcagtgcgaggtacatgaccagtccggtccactctgcggcgttcgacgaggcccatccgctcaggaaccagtccacctcggcgaatttcagcagggcgctcaccacgcccatcagcgcgccgccggcgatgaagcccgacgcgatcagcgtgccgcggtcgaagcgcgccttgttgagagcttcgtccttcgagcggttcgaaacgaaccacgctaccagaccgccgactaccagcggagcgttcagctccatcgggatgaacatgcccagtgcgaaagcgagtgccggaacgccgatcgaggtcagcaccagcgccagcgccgcgccgcagaagtagagcatccacggggtctggccgccggtcatcaggggctggatcacggccgccatggcgttggcctgcggagccacgagggcgccctcgcccacgaatccgtacgatttgttgaggatgatcatcaccccggccacggttgccgcagcaacgaacgtgccgaggaatttccatgcctcctgcttgcggggcgtggtgccgagccagtagccgatcttgaggtcggtgatgaagccgccggccatcgagagcgccgtgcagaccacgccgccgatgatcagcgccgccgtcatgcccgtcgtgccgctcagtccgacgcttacgagcaccagcgacgagaggatgagcgtcatcagcgtcatgcccgacacggggttcgtgccgacgatggcgatggcgttggccgccacggtcgtgaagaggaacgagatgacgaagacgatcagaatggccgttacggactgtacccagccgtcgagtagtccgaagtggaagaagacgaagatcgagacgagcgtggcgatcaggatcgtgaggatgcgcttcatcgtcaggtcgcgctgcgtgcgttcggtagcggcggcttgggttttgttgcccccccccaactccgaaacggccagccctacggcctgacggatgatcttcgactgtttgacgatgccgatgatgcccgccatggcgataccgccgatgcccagcggcttgccgatgaaggcgaagaggttctcggccgtgaaaagacgctgcggatcggccatgatgtcggcgcgcgttacgcccagcagcgaagccatggcagccgggtcgatgctgtcggccagcgaacccaccagcggcacgacgaggaaccagaccagacacgaacctgcggtgatgatcatggcgtatttcagaccgatgatgtagcccagacccagcacggcggccgaggtgttgagcgaaaagacgaccttgaacttgtcggcggcgacctgtccccatgcgcagatgcgcgtcgagaccgcttcggtccacatgccgaacgtgccgacggcgaaatcgtaaagaccgcctatgagtcccgccacggccagcagcttggcctgattgccgcccttctcgccggagatgagcacttcggtcgtagccgtcgcttcggggaaggggtatttaccgtgcatctccttgacgaagtatttgcggaacgggatcagcaggacgatacccagcaggccgccgaagagcgacgagaggaatacctgatagaatgccgcgtcgagtccgaggatgtagagcgccgggagggtgaagatggcgcccgcgacgattacgcccgaacaggcgccgatcgactggatgatgacgttctgtcccagcatgttctttttacccagtacgttgcccatgccgacggcgatgatggcgatcgggatcgccgcttcgaatacctgtccgaccttcaggccgagaaatgccgccgcggccgagaagacgacggccatgacgatgcccatcgtgaccgaatagggcgtcacctcgcggggcgacgacgaggcgggcatgatgggcgtgtactcttcgcccggtttgagttcccggtaagcgttttcgggcagcgatgtaagttgtttttcctgttccatttattgaggttctttgatgtatttgtccagatccttgaggatgtagtagcggttgagcgatgcgggcgccttcttctcgtcgaggtagctgtagagggcgccgattgcggccgccagacgcagccgctcgccgtgctcttcggatgccgcggcgaagtcgaacagcagttcggcgaatttttcgaggtccgcgtcgctgaatccgtattcgccgacgagggtggcgatgaaatcctctccggccagcagcgtgtcgatgtccagatccaactgctcggccagctccgttttggcggtttcccggatgagttcgggggcgcccgactttttgaggagaccgattttgtccagaagggctgcgatcagctctccgatgcggttgatttcacgtaagatatagtcttccatagttagcggttgtcgccgctgcccgaaatgatgtgacgctgcatgcgcgaacggagcttgtcgacgttcatctgcgccacgtcgtccagttcgtagcccagatcgcgcgagagcgtggcgcagtaccacaatacgtcgccgatctccttgacgatttcgagccgtttctcgtcggagaactcctcgtgtccgtcgcggatgactttcttgactttgtcggccacctcgcccgcttcgcccgtcagtccgagcgtggggtagatgatgcggcggttttcggggtagatcgccgtttcgagcgcgtgctgctgatattcgttgagtgtcatgaatgctgagaatttgaacgtttgggaataactgtcggacaaaaataacaaaataatttagaaatacgcaccaaaaagcccttgttcctcacgaacaagggccgaagaatcgcgccgcttccccggcggcggggtgttttgccgcctacggcccgattcgcacgaatccggattccggacggcgggacgaatcggggagtgctgcggttatgcgcggggcggttccgaacgcggtctttccgctgttggaaatcaacgggaacagtctggccggattaacggcggccgccggcgattatcatttcgcggagcgtggcgttgaacggctcctgccggagcagctcctccagcgtgaggtgcatgcggtagcgccagtaatagcggggcgcggccgggatgttgatgcgctccctgtccgcatgcggactgcgcagggccgcgtcggtcgcgagccagtcctgcagcggaagtatggcgagcatggccggggagcgtaggtgcatgtcgacgatgcggcggcagatccacggttcgcaggtgcggggagcgtcgccctccatgcccagcacttcgcggtagaaacgttccgagagttcgcggttctcctcccaccatgcccgcaggggattcatgtcgtgggtcgaggtggtgcagaccgagaaataggggtagcgcgccgggtcggcgaacacctcgcccagcgatttgggcatccgctggatttcgagcgaaaggatttgcagtgcgcgcatcgtttcgggaacgctgtcgggaatcatgccgaggtcctcgccgcaggccagcatccgcgtcgccgagaggagcacggggagtttgcgcagggccgactcctgccagaaccggttgtggcggcggtaaaagaagtcgtcgtgaagccggtcgaaagtgtcgcgccgctgcgggtcgagggtgcggtacatataggtcgattgggccgcgatgcggggatggaaaaaacctttgcggcgcgggtcctcgatgaacagcacgtcgtcgagcagcgtcatcagcccttcgcgcaggcggcttcggcgcggatcgtcgccgggaaagcgctcggcgaccttgcgttgcgtcgcataggcgggcagcagccggccctccttcatgcaggtcgtgcgcacttcgtcggccagctcgccgaacagttcgccgagcatccggtcgtcgggcgcgggaacggtgaagcgtcccccggccgtatcgaagcccatgccgcgcagttcgtcggcggagtagggcagggcgggattgaaatagcccagcaggccgtgaacggcatgtacgggaatctcccagatgcggaagaagccgaggatatggtcgatgcggaaagcgtcgaaatattcggccatcttcgccatgcgggcctgccaccacgcatagccgtcctgcgccatgtgctcccagtcgtaggtcgggaagccccagttctggcccgatgcggaaaaggcgtcgggcggtgctccggcctgcgaatccatgtggaaaagccgcggatgaatccatgcgtcggcgctcgtccggctgacgccgatcggcaggtcgcccttgaggacgacgccccggctgcgggcgtaggcgcagacctcggacagttgcgtgtgcaggtggtactgcacgaagcagtgaaacgcgatttcgcggctgttgcggcggcagtaggcttcgacggcctttttgtcgtagcgggcgtaatcgccccagcgggagaaatcggcggtgccgaactcgtcgcgcagggtgcggtaggcggcatacggtaggagccaacggctgttggcctgcatgaattcccggtagtcgcggcgggtggcggtgcgacgcccctctcgctcgaacgcgctgcgcagcagacgcagtttatgcgtattgacctgttggtaatcgacttcgggcagggcgttcagccggtcgcgcaggctgcggtattcgtcgtcctcttcgacgccggcggcggtcagccggatgaactgcgggtgcagggcgaagatcgaattggcgttgtaggggtaggagtcttcccacgtgccgttcatcgtggtgtcgttgatcggcagcagctggagtacccgctggcccgttgcggcggcccagtcgatcagcagtttcaggtcgtggaattcgccgacgccgaatccggcttccgagcggagcgaaaagaccggaatcgccgtcccggctccgcgccacctgcgttcggggaagcggaggtacgccgcggcttcgacgatgtgttcgccttcgccgggcaggtcgttccatgcgcggttgggaccttcctcccacatgatcggggtcagggtcctgcggtcggcgatcaggaacttgtattcgaatctctgcggcgcgtcgagccggagatcccactccggaaaccggctgtcgtccatcggaacgatccgctgccacccctccagctccctgccgctgcctgcgacggccagcacttcgtcggggcgcagggtcggcaggacgacgcgcagggtgatgttgccgccgtttttctgctgcggcccgctttcgccgcggccgaatatgccccgcgtgaaggccgaggagtagaagggcgtatcggcgggcatgtcgatccagcggtcgcggatgcggagcgtgcggggcgcaggtgtggcggggatgcgcaggatgtgcggacgccattcgcggcggatgcacacgccctcgcgctcgacttcgtaacggtattctgccggttgcgccgcaggggcgtatcgctctacggcgcaggtccagacgccgctgtcggcgtattgcagggcgatgcgccgcctgccgaggcggagtacgagctgttcgccccagcgggtgcggtattcgatgctgaacaggagtgtcatggcattggattgtgggaggttctgatcggtacttggggtgtcgattgtctttttgcggaatcaaaaataaccaaaataatcgaatgacggaaatcccccggcggagaagcggcgaaaagcgaacctcagagtccttcgatgaatccggtgacggcggcgaccagctccggagcgaccggaagcgtatcgtccgtataggcggcgatctgctccgtgcgcgtggggccggaggcttttttgagcgtgtgggtcatgccttcgatgatcgttttccgggaccgggactgggctttcgccagtgcgtcggcgttgtcgggcgtcacttggaagtcgatgtcgccgttgacgatcagtacgggaaccgtcactttgcgaatctcctcgcgcgggtcgtagctcagcgacgagatccagaatgtctgtaacgggggtgcgaagaggggcgtcagttcgggcggacacgactcgacccgttcgccgcgtttcagggcggcggtgatggcacgggcctgcatcagcagctccatgtgtgtcggggcgagttgtgcggccagctgaagctggagtatttcgtcgagcggatagccggcgcccgccaacgaaatcacggcatcgacttcggggcattgttgcgccgcgcagaaggcgatcagcgccccctcgctgtggccgatcagcacgatgcggcggaaatcctgccgggagaggtactcggcccatgccgcagcgtcgccgatgaagtcgtcgagcgtggcgtcggccattttgtccgggtcgtcgaatttgctcgatccgatgccccgtttgtcgtagcggagcgtggcgatacccgctttttcaagctcctgcgccagatagaggtagttgttcgtgttgccgttgcggggtgtgggacctgatcccgcgatgaggaccgccacggtttcggcgccttcgtcaggcgtgagcagcgtgccgtagagggttccgaaattgcgttcgagcgaaacgcttttctcgccggcggcggcattggccgcggccagcagcagaagtgcggacagcaatcgtttcatggcattattatttaggcggttctcgttcgtcggtgtggttctgtccggggtaaaggcgctttttgtcggcgcggcgcccctcttcgctccgggctctcccttgttccgggtcctgtctcgctccgggtcctgtctcgctccggggcctccttctgcttcgggcccctcctcgttccggcgttgtgcggcggaacggtcctgtaaggcggggcgactctgtgcgcgggagggcctgccgggcgatgttacagctcttcgagcgccttttccagcccgatgccgcgtgaacccttgaccagcacgaaggcgttctcgaccggacggcggcgcagttcggcgatcagctcctcgcgcgaggggaagagggcggtgttggcgggctgcggctccatgccggcgcaggcgcgggcgaattctccgcccacgagcatcagttcagcgtccggattccgggctgcgagggcgacgatgtcgcggtgctcctgctccgaccatgcgcccagttcgagcatgtcgcccagaatcagcacgcggcggcttctgccgccggccggctcggcgaggaagttgaggaccgaagcgcgcatgctcgacgggttggcgttgtagcaatccacgatcagcgtgttgcgctccgtttcggtccgctgcgaacggttgttgtcgggcatatagctgccgacggcgtggcggatgcgttcgccgtcgatgtcgaaatagcgtcctacggccacggccgccgcgatgttgaagcggttgtagtctccttccagatggtgcgcgatgccgtcggccagtgttacggagtagtattccgcagccagcccgtcgcgctccgcggccatgttggtcagcgtttggtcttcgcgcgggacgaaggcgcggccgccgttcgcggccagatagtccagcagctcgcccttgccgcggcgaatgccctccgggccgccgaatccttcgaggtgcgcgcggccgatgttggtcaggatgccgtagttgggttcggcgatagacgccagcagggcgatttcgccgcaggcgctggcgcccatttcgaccacgccgaattcggtgtcgcgggtcatggcgagcagcgtcagcggcacgccgatgtggttgttgagattgccgtgcgtggcatagacttcgaagcgttcggccagcacgcggctcaccagctccttggtcgtggtcttgccgttgctgcccgaaatggccagaatcggaatcgccagttcgcggcggtattcgcgcgccagctcctgaagggcttcgagcgtatcgccgacgagtaccgtgcggtcgccgctgacggccgcaggatcgtccacgacggcgtatgcggcgcctttggagagtgcgtcggcggcgaagcggttgccgtcgaaggtcgccccgtgcagggcgaagaagacggaccccggctcgatgcggcgcgtgtcggtcgagatgcgggggtgccgccggaaaatatcgtacagttcggacatatggatgccgtatatgcgggctgccggcccggatgcgtcagatgtgtttgtctccgttgtggaatttgacttcgtcgatgaatttcttgatgttctgctcctcggagcgggggcagatcatcagcacgtcgtcggtatccacgacgatatactccttcaggccgctgatgacggccaccttgtccttgggcagcgaaacgatgctgctgcgcgtgtcgtaaaggtagcacccctgctcaggcacggcgttggcgtagcggtccttgcgcgaatgctggtagaccgagccccacgtgcctacgtcgctccagccgaaatcgccgcagcggacgtatacgttgtcggccttctccatgatgccgtagtcgatcgaaatggcgcggcactccgagaagacgatttcgacggtggttttctcggcgtcggtgcccagcgccttcatcacgccgctgaacatggcgtggtgttcgggcaggtgtttccggaacgcttcgacgatggtctgcactttccagatgaagatgcccgaattccagaagaattcgcccgtctgcaggaaggtctgcgccagttcgaggttcggtttctcggtgaagcacttgaccttgctgatgacgttggtgtccgaaacctgaatgtagccgtaacccgtatcgggacgtgtcggtttgatgccgacggtcagcagggcgtcgtgtttgtcggcgaattcgagacactcgccgatgatctggcggaagtcctcttcgttgagaatcaggtggtcggccggggtgacgatcatctccgcatcgggattctgtttcatcagcgtgtaggccgcataggcgatgcagggggccgtattgcggccgatcggttcgcagagcacctgccgttcgccgatttcggggatgtgttcgagtacgaggtccttgtatttatggttggtcacgacgagaaagttctcggcggggacgatttttgcaaagcgttcgtaagtgtggcggataaacgattttcccgttcccagtatgtcgaggaactgtttgggcatcgactgcctgctcttgggccagaagcgcgaaccgatgccgccggccatgatgacacaatatttgttgcttgccataagttataatatggaattaagtgagacaaagataaaaatattttgtaactttgccgcctattgctggaataaatatttttaggttcccgatgaaaataaaactgttcaccatacccaatctgctgaccctctcaagcctgctctgcggctcgtttgcggcggtttcggcgttggtttaccacgatctggagctgactttctggctcaccgtcgccgcgggcgtcttcgactattgcgacggcttcgccgcccggctgctgaagtgtccctcggccatcggcgtccagctggattcgctctccgacatggtttcgttcggattcgttccggcttcggtgcttttcgtgctgtggaacgacgcgcttgcggccgatgccgaaccgtggatgcgctacggcggcagcgtgctctgcttcgtggtggcggccttttcggcgctgcggctggccaagttcaatatcgacgaaacgcagcacaccgaattctgcggcctgcccactccggccaatgcgctgttcttcgctgcactgggctggatgaacgccgagacgggcttcagtctgggcgtctgggtgctcctgctgatgccggtcatgtcgtggctgctcatatcgccggtgagaatgttcgctttcaagttccggagtttttcttttaaaggcaacgagatccgctatctctttattgcgctgtccgttgtcctgttggtcgccttgggtgttcgggccgtcccggttatcattctgctttatatcgtcgtttcggcggtaaactggatcgtgacgctaaagagccgtgattcagcggcttgcccggaggaataattttatatctaaatttttttaattacctttgccgcggattcccgttctatgtcgagattgacgaaaagaatattgctgacagctttgctcggtctgttcctgacagcgcccggcgtcgtccgttcgcagggtttcgacgccaagacgctgatgcgtgcgcagcagcgcgggcagaccggcagcctctacggcaacaatccgttcgaacagcctgcggaagagggcgaggagggcgaacagcagccgcaggatacgaccaagaaggagcgcaagatccgcaagccgctcgaatcctattttttcagcgattcggtccgctcgctgaacaatttccgctggaacgtcaggcgcgactacaaccgcgttgagatcggaccgctggacacgacgctgaccgactggcgcatcgactatccgttctaccgcgaagaggtgggcgacatcgcgcagggcgctctcggacaggcttcgctgcctatgaactatttccggcggccccagaacttcgacttcggtttcgcgagtccctactatgcctacacgtacgatatggagaacgtgcccttctacaatacgaagaagccgatcatccgcatgacctacctcgaatcgggacagaagcgtttccgcgaggagaacttcaacatcatgcacgcgcagaacgtctcgccgacgacgggattcaacgtcgattacaaggcgcggggaacgcgcggccagtatatttggtcccgcaccaagaaccacaacctcgcggtggcgttcaaccatacgggcaaacgctattcggtgcatgcggcctattacaacaaccacatcgagcagcaggaaaacggcggcgtggtcggcacgtgggccattgccgatacgacgttccagatgccgtcgggcgtgccgatgaagctggccgacgccgaggcgcagaatacctaccgcaacaacgccttcttcgtcacccagtcgtatgcgcttccgctgcagcgggtgacggacaacgatttttcgctggccgacctttcggcggtattcataggccattcgttcgagtacagctcgtggagcaaggtctatacggatataaaggctggctatacgaacgagcggggcgagcgggacccggagacgggcgaattcaagcctacggaggggatttactacaaggactggttcatcaatccccgcgatacgcgcgactcgatttacgagcgcgttatctcgaaccgcttcttcgttcaggcgcagccttgggaccgcaacggcgtggtaggcacgattgatgccggcataggcatcgacatgcatacctactcgcagttcgaaatgcgtgatttcctgacgggaaagtatacgaaggtcaacaagaccagctatttcgcatacggctccgtcggaggcaagataaaaaaatatgtcgattgggatgcgaacctcaagttctacccgtcgggatacagaggcggagacctcaccttgggcgcccatctggcgctgacggggtatctccgcggacaccccctgattctcgaaggtcggttcacgatggaccgccgctcgcccaactactggcaggagaatctcttctcgaaccattatatatggtccactcctttaggcaaggagaatgaaactcggttcgaggtgaagttttcgattcccgatttcgcgtttgaagcgggagcatggcagggcgtcgtcagcgacaagatctattacgacgcagacagccagattacccagcagggtggaaacgtaagcctcacgagtgtgtacgctcgcaaagatttccgcttaggcggacttcatttggacaacagggtattgttgcagtggagtacgaatcaagaagttgcacccgttccgcttttgagcgccttcctttcgtattattacgaattctgggtcgtgcgcgacgtactgcgcctgcagatcggtttggacggacgttataatacgcgttattatgcgcccggttacaatcccgcactgtcggcgttttacaaccagcgcgaggtcgaggtggggaattatccctacgtggacgctttcgtcatgggtaagtggaagagaatgcggatattcctgaaatatcagcatgtgaacaagggactgttcggtaacggagaatatttctcggcggctaactatccgctgaatccgggcatgttcaaaatcggtatctcatggggtttctatgattagcgtattgttctgcgcggtgtgaactgcccgcaaaacaaccttttatgttaaaaaagacagttttaacgtttgcgttcttaacaattcttacgacattttacggctttaacgccaagttcagcacacccgtgacggacgacatgctgaacgaagaggccgatttcggcaattcgctgctcagcgacggcgattacgtgatttcggcctacgacaacatcattcgcaacatcagcgaaaaagagggccacgactggcgcctgatgagcgccatcgcgtatcacgagtcgcgttttacgcccgatatcacctcgcgcagcggagccaagggactgatgcagatcatgccttcggtagcgcgtcagttcgacgttccggcaggcgatatagccaatccagagaccaacatatggctggccaacaagctgatgtcgaaaataaagagtacgctccgttttcctgcggaaacttcggacaaggaccggatgagcataatactggcctgctacaacagcggtataggccatgtgaacgatgcccggcgtctggcgcgtgtcaacggggaggatcccaattcgtgggaggtggtagcccggtacctgcagctcaaggcgcagcccgaatactacgagaacgaagtggtcaagtgcggccgtttcaccggcagccggcagacgctggcttacgtgaacgacgtgataggccgttatgacaaatattgccgggtcgccgtgaggtgatttccgcccggcggaacgtaagccagagtgcgataacgaagcggcagaaccatcggttctgccgcttttgttttttgttctgagaggggcggcgaaggagtgggaacagcagcgagcgattgagactgcggtgagggattggagactgcggtgggggaggcagcggcgcggaactgggacctgagtgcccgtaatgaaaaaggatgggacgccgacgcgtcccatcctttttcgttgtgttttccggttttaacgctcccggcttaataaacccattcgaagtcgtcgacgtacatcgtgttcgtcgtgcagccgaccatgaagtcgccgtaggcgctggtcgagcaggagatgacgatgctgtatttgcccgtgggacgggcctgcgtgtcgtagaaatcgagcggcagcgtgatttcggtcatccggtcgccggcggtcgaacggtcgatgaacagcgaaccgcaggcgatgatcttgccctcgtccgttgccgtggtttccgtcgggtcccaagtgccggtcggggcgccccttcccgaagctacccggtgacgggcattccagtctacgattgccacgaagatccgggccttgtcctgatcgcccttgccgatcggcgctccgctgtgttttgtctgattgacgatgccgaccgtcgcatggtattttactttcatgccggaggggcgtgccgtccatgtgtagggctgcccgaattccacgacgccggtcgtcagaccgtctttgtagaagatgccggacatcaggttgcccgcggccagtcccacgatcgggggagccgaggctttcagcagggcgcagcggctgccgcccattccgtcgaaagcggccgatgtgcagagttcctcagcgaagccgttgttgccgctggcccagaattccgcattctgattctcttgtgtgaagcacgaaagccccggattttccatgttgccgtcgggtatgacgtcgcccgcggggacggtgtattcggacgtttcggtcgcttctccgttgacgagcagccgcaactcgtaggtctgacccgcatagacgcccttggtccgcaccagacgtttgacggggagcccggcggcgttggtcgagttcgtccattcgggggtgacagcggccgtgaagagtccggtttcgtcccgctcgcccttttgcgtcgcctgccactcgtcggtgcctttcacacggtattggatcacagcattgggatactcctcttccgttaccatggcggttatgacgcccgtgttgttccagagatcggtttcgcggaatgctactttcaggtcggtatgctcgacatggagcgtccagcgttcggtcgttccgtgataggtcgcatcgacgaaacgcatcgtttcgaagcccgaagccgaaagttcttccgccgtgggagagtaggtcgtgatgtcggcaggacccagtttgagccgggtgactgtaatgtcgccgaggttcgtccccttggccacataggccgtcgccgtacgtttctgggcgtctattaccgtcgcgccgatctggcctgcgaccgtaaaggcgcgctcgatcggctgttcggccacgatcgtccattcgtaatcctgatagagcgagagagtgacgtacagcggcgaacgcaggtcgaattctccgctgaggggccgcgacgttttgatctggccgatgaaagactccgtgtcggtcatcatcggattggaggtcgcgacgtcgaacgtaaccttgtcgatgccgactttgcgtatgtcggttttctcatccagcgtaagcgccacggtgcggttggcgatgctgatgcccgacacggtgaagccgctgccttcgacgcccgcgatcctgagttcgacgacgggataaggcacgtcgttgtcgatgcacgaagcggctaaaagaagcgctgctgccgagaagagtatgcggaaatatttcatgtcttactgctttttcttgtcccacaaatggatcgtcatgccgaaattgatggctgcgatgttgagccggaagcgcatgttcgaagccttgcgcgaaccgaccttgttgccgtcggcatccttctgggtgacggaattgtactgtatgccacccagcccgaacgaaagcgtcgcgcagacgttggggaagatgtagacggccgctcccggattaaacgaaagttttacctgcgtattgtcactgtaggtacgattggggttgccgccctccttgcggtcggggtcgtacaggaagttcgaagtacccgtagagagggccagttcgaattcggcgaagagtccgaaacgccccttgggatcgagtccggcgtacgaacggtggaagatgccgaacgagtagttgtcgctcgaaaggtcgatataggggagctgccccgaaaggtcgttgccctcgccggcatcgaaataggtgttgtcgagcgtgccgctcatgtggcggtaaccgaaacgcacgccgatgcagttgttgtcgcggtagaaatagccgacaaagggtttgaccgtagcaaccgtaccgtccgcgttgatgttgtcgaggatgagcatgatgttcgtatcgtcgcttgacagggtgccgtacgatgccgtcagccccatcatcacttcgcctttgtaggcgaatttgagtttgttgatttcgcggtcgatgcgtttgcgcgtcggcagaaagcgctgttccttgggccgtttctgcttttcggcggcgatgggcgacggtgcgggcgtcgcaaaggcgtctgcggtcagctgatttccggatgtctgttccgcggcgggcattgctgtccgttccgcaggggctgcggcggattcggccgtgaccgaaggcgtttcagcgtcggcagcggtttcggactgctgcattgcgggacgggcttgttctgtctccgctgcggcgccgagcgtaatgaataccgagaagatggaaagtatgattcgtttcatgtgcttgccgattttagagatagaatgccataccgagtccgatcgagaagatgttgaccttgaagttcatcatgctggcgtcgcgcttgccgaccgtaacctgattgtgtacctgcttggtgtgcgtataggtgatacccattacgccgacgtttacttcgacggccatgttgttcgtcgcgaaggccacgatgccgggcgaaatgccgagcgagaaggtgtagcctgtttcgtaggtgcccttcaccggggaatccttggcgaagcgcgcctgcgtgccgcctccggacagctgcatttcgttgaagagcgcgaagcgtttgttgcgtcccagcggaatgtactgccgccagattaccgccaccgagtagctgtggcgcagcgaatagtagtcgttcacctcgaaattgaggtccgaatcctcgccgccgaggttgaggtcggccttgtcgagcttgagcagcgagcgcgagtagatgaagcgtcctccgatggccatgttgtcgcgcaatgcgtaggcgatcatcgggctgaccttgaaggtgtagcccttcgattcgatgccttcgacgaccagaaaccggtaggtttcgttcgaatgggtcgagtaggaagccgttcctccgaatatccactgtccgcgcgggacgaagaggttgtgcgtgtcggtcagaccgcgctgttggcgcatttcattgattgtgagcgcgcgttcctgtccgacgctgtcggccgggagggacgcgtcctccgttgtctgctgcgcacgcagcgcctgagccgtacctgcgagatacagcagggtcaggagcgtgctgatggttattttgcgcattgtcgtgcgtttagtcgttaatatacccattcaaaatcgtcgatatacatcacattcgtcgtgcaggcgtccataaagtcgccgtacgcactcgttgcgcaggatacggcgatattgaatttgccctgcggagcaacggccgtgttctggtaataatttatcggcatcgtgatttctaccatttcatcgccgggggttgtctcgtcgatgaatttcgatgcatagccgataatgggaccgttggctgcttcggtctgtgtctccggatcccatgtgcctgtcggggcttttgtgccggcaaataccttttgctgggccgaccagtccacgatacatacgaatacccgcgctttgtccatttcgccgacgggaatcttcccttcgtggaggttgtagtccacaagtccgattgttgcgtggtatttgaatttgattgctttcggccttgcgttgtaggtgaaatttttgccgaaagagacattgccacccattgggacaagcgaaatgccgaagtctcccgtaaatagattacccggagcaggaaccttggccagcgtgttataggttgcggtcagtttggcgcaatagcttccgactctgccgggcatggtatcgtcgcgggtgcacaggtctttggcgaacgagttataaccgcttccccagaacgtgtatttggtgccgcttcccggaaactgcttgtcgcttctccacatttcgagactgccgtcagtcatggcattgcctgcttgggtcgtgaattgcccggtatgctctgcgccgttaatggtggctttatagtcataagtgtttcctgcggaaatgccggtcccgtctttgattcgcgaatagggcagcaccgtattgggcgtactccagtcggcttcggtcttattttcccattcgggcgcataggtcgccgagatgaaatcgtcgccctgcgacgtgccggtcaggtatttccattggccgtcgctgccgcacagaccgaacgttacgtttgccgaccgggtgaaatccacgacctgcagcgttacggtattggcccagaggtcgtagcttttttccgtaaccggaaccagtccctgcagacggtaggtcgtcgaaatctcgttgctgccgccgttggcgtcttccacatggatcgtcacggcgtggtcgccgcccgctagtcctgcgaagaaggcgtcggacaacgtcagttcggtgttgtatttatcggtaggcgtgaatgaaatgccttcgtgcgtgccggtgagcaagtcgtagctgtcgtcgccgaccgagaccgtgaattttttcagctctgcgaaagccatgatccggtatttcttctcgccggacgtgtatttctgcacctcgtcgttgtcgaatccctcggtgagaagggccggatcgggactgaaaataatcttgtcgtccttgtcttccgtctcggtatcgacgcggatcagcagggcgtcgatataacccggcaggtcgggggagtagcggaaggtgaagacgtatttgccgccggccttgacctcggtcagcgtgttttccatctcgacctgcttgcccgacgtatgcgtgccgcggaacatccatgccagcgaagtcgtacctgcgggcagggtgtaatagcccgtgccttcgtccgtgaatttgagcgcaggaaccgcacccgactcggcttccgcctcgtcgaatttgtccgtaccggctatccatacgaagtagcccggatcgagattctcgacgatcgaagcgtcgaatttgacttcgacgacggtgttcgcgatcttgcaaactacctccgcatgggtcgtttcgccgggtttgacggtgaatgtctcctcgcctttgtagaagcgtttcgagaaatccgcggggacctgttcgcccgcctcgaccgctacgcggtaagtgccggagagcagctccagccgttcgggaatgtcgtctttcgcggcgtatttgcggagcagcccgccctcgctgttatagatatacactttctggtattgcagcggatcgtattcgccgttgtcttccgcccgcgaggtcgaaatcgtcatcgccatcacgcccgtgcgcccgtcgccggcaggagtttcgtcctgcgagcatgacgcgccggtgagtgccgtgagcagcatggcgatatatgtgatgtgtcttttcattattcggcggctttaacgatgagtttgacggtcttgtgcgtcaatacgttgttgttgtccgtcacgtcgaggacgaagttatgctcgcccggaatctccagcagtatctcgacgaatttggtgatcgagaacattacggcggtctggttcttcacctgttcgttgatcgggaatccgaattcgtcgtggagaatcgcggccagatcggccggaatgtcgcagatgtcgaacttctccggcctgttgatgaccggaagcagatctttcagtgcctcggagtcgatcgtaacccagaacgacttgatgcctgcagttgcagtcacgtcgatgtcgatgaccatgtctttctgcacttcgtactgctggtcgatatcatagcctctccagacgattgcaggaccctcctgacccgcgcttttgtccacgacgagcgtcagcgcggcggcggtcgagacgcctttgtcgtcggtcatgtcgaacgagaaggtgtgcgtgccgtcgaattcgtagagcgccttgatctgccctgcgatgttgaagctcttggcctgctggcccttgagttcgccgcctaccgggtagccgaatcctttgagtatgatgcctgccggcgacgacgcgtcgagcgcgcagaggtcgaacgtttcgggaagctggatcgccgccatcgaagccatgaactgactgctggtcgaagcgatattgacgcgcagcgactcgatgccgttgggcgatgcgaggtcgaagacgaacggttcgatgcagttgccgttgtcgtcgaacatggcgtccgtcagcgtaaaaggcttggacatgtcatgtccgggccatgcgagagccggtgcgctggggtcttcgagaagctcttccagcaggttgtcggtgccgtctacgacgaaagagttgtcctgaatgatgttgttgtccaccgttacctgaaacagaagcgttcctttgtcggcgtagttgattacgaccgaaatcttacgccactggccggccttgactcccgtgatctgcttgctgaactgcgcggggatgtcggtgccggcgaaaacgccgtcgaagttgaaaaccagcgtattctcgatgtccagcgatttgaagtaggccgcgcgcgtttcggttttgagaaactcctgactggtctggcccagcgatatggtcgccttgctggtgtcggccagcatgccggccagttcggacgaataatccaccgtgaccttgatattctgcaatgtgcagaccacctcttcgagctgggtcgtctgcgcctttgaaatcgtgaagctgctcgtcgcgccgtaaaccgggtgctcccacgctacgtccggagtgctctccttcgagcgcacctccatgcggtaggcgcccaccggaagttccatcggctcggcgagctgctgtttgagttcggcataggtttttttgaatacctgcgcgttgtcggcgtcgagaatttctacgatgaaaccgtccacgtcgggttgctcggcacgggtgccggatacggcctgcgggctttgcgtttggtccgaagtgtcgtcgggacgaacgtccgtctcgtcatagaccacccgcatcgaaaggccgcttaccgacaggaagcccgtcgcgtcgcccggcgtcggcttgggttcctccttgtagggaggttcttcgttcacacagcctgccgcaacgaacgctgcaaccgccaacatcgtaaaaagtctggtaaatgtcttcatatcttttgctgtttttattccttatttggtatcgtctatggccccctcgttgacttcgcagtcaatctgccgggtttcggtgtagtcgtcgctgagcgtgacggtcagcgtgacgctgcccgcatccttggcgtcgaaggtgagaacgtggcaggtgcgcggcgaagtggcttcgagcgtttgctcggagaaggtgaccttaggcccctcgtcggttccggtctggctctggcggcgtgccgtgccggttaccttgagcgtcgtggcgcttttgacgaataccggctcgtcggcgggcgtgctgccgggcgtgaagtcgaactggttgcccgatgccgtcgttacggtaaactgcgcgtcgtggaaatagttgaggaactgttccgtggcgcggaccaccgtctgcgagttggcgatcgtagcggtcatctccaccgttgcagcgcggcggggcagcacctcgacgctcttctccgcggcataatagggtttgtcgattccctccgcatcggggtcgccgtgtgcgacggagacggcgtaggttcccattcggaacacggcgtcgctctgctcgaattccgtgagcgtatcccactgctgcgtccccgattctccggtgaccgtaagcgtgaaatcgccggcttgggggacggagggcgcagccggcatccgggaagtgtcgtccgatgcggcgacgatcgaaccgtcggcggtgcagctgaccttcagcgtgccgtattccgtgccttcggccttgttttccgtggagcatccggccgccagcagggccgccgatgccattaagtatatgagttgtcttttcatggtattccagccgttcaatggtgagtgttgtcggtcgtgccgtttgcggacggcgctgccggagcgtcagctgcatgtgccgctttgactgtcccggtcggggcgcctttatacgaaacgtcccgaagcgtctgtttggagcgggatgtccgggtttttgttcgcatggatgcagtcttttgttgacaatatgcaaaaataggcatgtgccgcggatttgtaaaataaattcaacgaacagcgcatttttcatcacgaacactcgacgcgccgcactccgacggaccggattctcctctcttcggatgtctttccgcagccgggaaatggcttgcgcgcccttctttcgcggtgcgggcggtgcctaataaaagaacctccctgcaatcgcagggaggtcgggggtgaaggccgcggggccttcgggtttgttatcggaggattagtatacccacttgaaatcgtctacccagagtttgttcgtgtcgcatccggtcagatagtcgcccaagtagctggtagcagtcgaaatgaccagcgtgtacttgctcgtcggagccttgtccgtcttttcgtaatagacgatcggaagctccagatccttcatgctgccggtgtgagactccgtgatgtaggcggaaccgtagccgatgattttgccttcgttcaggctcgatacggtttccgggtcccagaacgtcgttttgtccaccttggtgcccgatttcaccgcatggcggtcgctccattctacgatacagacgaagatgcgtcctttgtcgatgccggtgcttacgggcggatcgttcttgacccggttgatttcgcctatctcggcggcatatttcagtttgagggcggcgggacgtgcggaataggtgtagggctgtccgaattgtgcgtaaccgaccgtgccgtccatcacgaaatctccggtgtagaggttgcccgcagcgaatgcgatgcctgcatacttcgcggcgagttgcgcgcagtagttgccgaccttgccggaataggtggcctgagtgcataatttgtcggttcccgaactggtcagataggcgttgttgccgctgtcccagaatttgtcggtccctgttgcgtcttcgtatttgacggcattcggatagggtacgttggcagagcctgagaacatctttttcatcgatttcgtactccagctctccatgcctgcattgggaatgacgtcgccgttgttgtttttcggcgtgaattcgcccgaagcgaccgttgcgccgtcggcgagcagttggtattcgtagctcttgcgggcgaagatgccggtcttgggatcgacggtatatatggtaaggcctgcgtcatttgttccctctgtccatgtcgggctgattttggccgtgcgggacccgtctgcattggctgtaatatcggcgtcgttccatgtggtctgacctttgattctgtattgcacggaaacggatgtcgcatcggcagggatgttcaaggtaaacgatgctgtattggcccaaaggtctgcgtcgttgttgtaagtgatgggggaaacgactgtttttacgtatttcagcgtgatgactgttttttgtccggcattgtccgtgacggtgaacttgaaatcggagttcgtcgtttcggtcacctcggcgcagaccatggcgagcatgtctatcagaccgccgatctggaaatacacatgctgctggttgagcagttgtgccggagtcggaaaaccgaatccggctaaagcggctgccatgtcattattggcgggattggtcagttccatcgaaggggcgagttttaccgcctccagcaaattttgttcgcttccctccataggagttgtcagtaccgacgaggtgatatccacctgcatcgacttgatgccgcccggtgcgctgacccggatattggcgctgttgccgctttcgagcagttcggtgggtgtcgtaaggtcttcgtggccgatccacttgacggtcggggctgcggctttggtgaatgatgcggtccgctccaccgtgtagacccagttggcgacgacgggtgtcgttcgggtgatcgtgaagcttgctgcgttgcctttgtcggtgcaggccgagaaggtcaggtcgccgtagctgtcatcagggagcacgttgaaaaaggtctcgctgtaatcggccgaaggagccgtgccgtcggcgtaggtgacggtgatgtgctccgagttgatcgagatgggagagcccattgcggaggtgccttcgacgaccagcttcggggtgatagccgacggatcgtatgtggcgttcgggtccgagggaacggtgaaggtcagcttttcggaggcgatcggttttttcgacgtcagcatgacggaggctattttctccgacgcagcgccgccttgcagtttgagcgcgaggatcgaggtgatgcggtgaagattgaactttacggcattcccttccggcgttttgcccggcttggcgttgttgtgggtgatggcgtcggcggccatgatgtcgaattcgctgttgtatttgtttccgttctgggtgcgcagggcgctgaaaggaaccgttacggtcgtgccggaaacggtggcgtttccgttgtgagggtagaaggcgcggtacgcccaagtgcctgcggagccgaagagcgagcctgtaaaagccttgctgtctgtggtgtacgtaaattgcaggagcttcgagaagtcgttggcgaggacgccgagtttgtcttcgccgttccatgtgccggtaagaccggtgccgaaatcgacgttgatgtcggcgcggctttgttcgcggggagcgatatcggcgagaaaaccgacggcagttgctccgtcgccggatgttgcgggaacttcctcgtaggtgctgcacgcgccgaggagaagcgctgcggtcagcgttaaaagagagacttgttttttcatggctgccggttttttattcgttttcgcccaaataaaaatcgtcgtagcagctcagggggctgattccgtcggaggaagggacgtctccggacgtggcaaatcctttttccgcggcgacctcaatcgtctcgatcatcggggcggagtattgccccccccctttcgtggttgatacaatttccatggtatgcaatagtttaaaatggtatgcaatagtttaaagtgacctaacaaaaataggcggaaagcggatcatctgaaaataaattcaatgaacgggcagtgtttcatcacgaaaaggcatgtttgccttgtggaaccggaatcgattgcggcaatattgcaaggcggtggaaatcaacaaaaaacctccctgcaggcgcagggaggtcgggggtgaaggccgcggggccttcgggtttgttatcgggagatcagtatacccactcgaaatcgtctacccagagtttgttcgcgtcgcatccggtcaggtagtcgcccagatagctggtcgcggtcgagatgaccagcgtgtagttgcccgtcggaggtgtgtccgtcttttcgtaatagacgatcggaagcgccagatccttcatgctgccggtgtgagactccgtgatgtaggcgggaccgtagccgatgattttgccttcgttcaggctcgatacggtttcggggtcccagaacgtcgtcttgtccaccgtggtgcccgattgcaccgcatggcggtcgctccattcgacgatacagacgaagatgcgtcctttgtcgatgccggtgcttacgggcggatcgttcttgacccggttgatttcgcctatctcggcggcgtatttcagtttgagggcggcgggacgtgccgaataggtgtacggctgtccgaattgtgcgtaaccgactgtgccgtccatcacgaaatctccggtgtagaggttgcccgcagcgaatgcgatgcctgcatacttcgcggcgagttgcgcgcaataatcaccgaccatgccgggatatgttgcctgagtgcataatttgtcggttcccgaactggtcatataggcgttcggatagggtacgttggcagagcctgagaatatctttttcatcgatttcgtgctccagctctccatgcctgcattgggaatgacgtcgccgttgttgtttttcggcgtgaattcgcccgaagcgactgttgcgccgtcggcgagcagtcggtattcgtagctcttgcgggcgaagatgccggtcttgggatcgacgctatggatcgtcagcctcgcttcgttggtgccggtggtccagtcggggctgatcagggccgtgcggctgccgtcgtcgttcggcccggagacgctggcggcgttccatgcgctttcgccctttatgcggtattccggcacgacgctgccggcgtcggcgaactgattgctgatcgtcagcgaggcggtgtttttccaaaggtccgtttgatctacccgcacgagcgccggggccgtgaaggtcagcgattgctcggtcacctgccccgcgagatcggtcaccttgacgtcgaagacgtgttcgctgccggggtcgggacccagcaggaggatcatcggcacgagtgccgtgatgtcgaaaacgcactcttttttatattgtatttcggtctggcagctgagtccgagatctgcgaaggagatttcctcgatgacgtcggaatcgttgaacaggtcgagtttcgaaatgcccagcatgcccagtacgggcgacgaaacatcgacttccagaccggcgatgcctcccggtacatggatgttgatggcggcggagtaggtgagttggttgttgtcgtccacggtgatttcgtgcgcttggtcgatctcatgtcccggccagtcgaacgacggagcttcgagcggagcgaagacgggcgtttcggcgcgcttgtagagcttgcctgcggcaaacggtttgtctgccccgcgttcgatggcgaccgtaccgatccggggtgccgtaatcacgtctacagtcagtttgtcgtagctccccggcatgatgttgaagaaggcgttgatgtcgttggcgtcgggagccgtgccctgctcgaagcccagcgcgatgaggttcgacggagcggtttggctgaatgcgagtccggagcccatgtctgaaatgtcgaagtcgatgctcgcggccgagagcgtctgggtttcgttttccgaagtcagcagcaggtagcggaccttgtcggcattgtctccgccttttacctccagattgagaatcgaggtcaggcggctgagggtgaatcggaccggatcgccttcgtcggttttgcccggttcggcattggcgaagttcaggcacggggccaccagtgcgtcggaggcgcagttgaaagcgttgccgctctgggtgcgcaggttgccgaacggaatgctggctttggtgccgtttacggtcgcatggggatagaaagccatgtattgccacgcaccgctctgcgccggcagctctccttcgaatgcgaagtcgttgttgttggtgaacggccgaagttcgggagttgagccgggggcggtgaaaagaattcccatagcgtcgttctcttcccaatatccggtaaatgtgctttccccgacggagatgccggcacgggtttcggcgtcgtcggcgacatcggcaaggagctttacggacgtattgccggcgcgcgccggatcgttcgtctcgtcgtaactgctgcagcccgcaaacagtgcggccgcagcgaggattgacagagctttatggaagtttttcatagctgcgccgttttttattcgttatccaaatagaaatcgtcgtagcttgcgccggtcggctctacgccgccgccggggaaggagttggcaaatcccttttcgggctgcacgtcgatctgttcgagcaggggtgtgacatagcacagcttccccgcccggtgggtggttacattcttcatagtcaaaatctgttaattgcgtcaaaagcaaatgtaggaaggtcctgactaagatgaaaataaattcaacgaaccggcggattcttccaatgaaccggtagatttggcggacggcggacgggctgaaatggtttaagaaagagcgaaaaggtttgcttggcgaacgataaaggccgcccgacgattcggacggccttcaatatcgagcctttcggacggttattttacgtatttgttcagccagccgaagaactcgcggttccagacgagcgagttctggggtttgaacacctgatgggcttcgttttcgaactccaccagacgggccgggattccgcggacgcgggcggcggtgaacgcttcgagcgactgcgtgtaggggatgcggaagtcgtattcgcccgtgaagatcagcatgggcgtgtcccatttctcgacgaatttgtgcggcgaattggcgtaggagcgctgtgcgacttcattcgaccgatcccagtagggacctccgtaatcgttgttgatgaaaaacagctcctcggtttggccgtacatcgactcgaagttgaagatgccgcagtgcgagataaaggccttgaaccgtttctcgtggcatccggccaggaaatagaccgaatatccgccgtacgatgcgccgacgcatcccatgcgggtctcgtcggcccacggctccttcgccacgtcgtcgatggccgagaggtagtcgcggatgttctggcccgaatagtcgcccgaaatctggtcgagccactcctgtccgaacgagggcaggccgcggcggttgggcgcaacgacgacgtaaccctgcgccgccatcagctggaaattccagcggtagctccagaactgcgaaacgacgctctgcggaccgccctgacagtagagcagcgtggggtatttcttggcgggatcgaagtcgggcggcaggatcacccacgtcagcatctgtttgccgtcggtggtcctgacccagcgtttctgcacctcgcccattctgatattgtcgtagacgggtttgttgatggccgaaatctgcgtcagcgtgccgtcggcgggattcacgtcgaagaactccgtggccatcgagatcgtacacatttcggcggcgatcctgtcgcccgccatcgagaaggcgttgatgtcgtggtcgccgcgggtcaccacttcgacttcgccgaccgaaggcgcgatgcggcatatctggtgcgtggcttcgatcggggcgatgaagtagagcatgtcgctgccgctccagacgacgttcatggcgttgtagtcgaaatcctcggtcaggtcctgcatttgggccgtctggcagtcgtagaggaacaggcgcgccttgtccgactcgttgccggcacggcgctgcgagaggaacgcgatctgccggtcgtcgggcgaccagacggggtatttgtcgtaacccgccatcgtggccatgtctgcgatcggttcgccggtattgacgtttacgggtttgcagatgttctgcgtcacgccgttttcgaggacgtagacgaagatgtccgaatcggtcgaaacggcgtactcggtgccggtcagcggcttgcaggtgtacgccagcatcgttccggcgttgttccacgcgatttcggccatgtcgaagtagggtgccagcggagcgtcccacgcggcgtccttgccgatgatgtccacgccgggcttcagcccctcggctccgaagtcgccgacgaagatatgcaggtaggaaccctcgtcccagtaattccagtggcgggccatcaggtcgtcgtagatgcgggccttcgatttgtccatgtccttgtagacgtccgacgacttgcggtcgcagacctcgacgcgctgtacgtaccacgccttgtcgccgcggggactgatgccgaagccttcgacgtccttgtcgaatgccgagagctgtctggcgttgccgcctgcgggcgtcatttcccatacctgcatcgagccgctgcggtccgagaggaagtagatcttctccccgtcggcgctccacttgggatcggcgttgttcgacgcggtgtcggtcaggcgcgtcacggccttggtcgcaaggtcttcgacccagatggtcgtcacgccgcggttttcggccatgttgtagtcggtctgcgcatagaggagcgtacgcccgtcgggcgagagcgacgaggagcctgcacggctcattttccacatcacctcaggggtgagaatgcctgtggcgatctcatcggccgtcagggcattgtcgatggtaaggggctgcggccgcctgctgtcgcatgcgctcagtcccgtagctgcaatagccataaaaaggagtaattttttcattttcggtcgggtttcttctatttattcgtatttttgcattcaaatccgatcggcatgaaccataccgtatattttgcagataaatccgtgattttcacttcggacgcgctcggcggcgaatgctatgccgtcgtgcccgcagatccggcggacctatcacgagcgaaggtaacgaaaattctcgaatcgcacaactgcgtcgcagtcgtttctgccgatcccgacgcggcgttccgctcttttgcggctgattttacgcagatcgaagcggcgggcggcgtggtggtgaacgaccgcggcgagtggctgatgatgcgccgcaacggccgctgggacctgcccaagggacatctcgaatgcggcgagcgcatcgaagcgtgcgccgtgcgcgaaatcgtcgaggagacgggcgtgtgcgccgaaccggtgcggccgctgtgccggacgtggcacgcctattatttcccgaagaccgaacgctgggagctgaaacgcacccattggtacgaactgcgcgcggcggcctgcggcgacctcgtaccgcagaccgaagaggggatcgagacggtcgtctggtgcactccggccgaagcgatggcccatgccgccgggagtttccccacggtgcgagccgtgctcgaacggctcgaagcctgcttgtctgacgataaaaaacgctgatccatatgctttcaatctccgcttccgcctatcccgactcgaagccccattatgcgatcctcgacggtctgcgcggcgtcgcgtcgctggtcgtcgtggcttttcatcttttcgaggcgcatgccgcgagccatgccgaccagatcatcaaccacggctatctggccgtcgatttcttcttcgtcctttcgggcttcgtcatcggctatgcctacgacgaccgctggggacgcatgacctaccgcgatttcttcaagcgccgtctgatccgcctgcatcccatggtagtgatgggcatgctgatcggcgctgcggcgttctccttcggcgcctgaggaccttacgaaatgatcgccggcgttccggtcggacgcatgcttctgatcctgctgctggggtgtctgatgattcccgtgccgccgtcgatggatattcgcggctggagtgagacctatccgctggacggccccgcatggtcgcttttcttcgagtatatcgccaatatctgctatgcccttgtcctgcggcgtctttcgaagctgttgctgggggcgctcgccgttgtcgcggcatgctttacggtgcgtctcgccgtgacgcagggcgatatgatcggcggctgggcgctcgacggcgaacagctcggcgtaggtttcacgcggctggcctatccgtttatcgccggactgctgctgtcgcgcgtcggaaagccggtccgtctgcgcggcgctttctggctttgcagtctctgcgtcgtcgccgtgctggccatgccgcatctggggacggaccgcttgtggctgaacggtctctacgacgccgtgtgcatcatcgtcctcttcccgctggtcgtagcggccggcgcgggcggcaaagtcacggaccgggagtcgaaaaaggtctgcggtttcttgggcgatatctcctatccgctgtatatcacgcactatccgttcgtctatatttatactgcgtgggtggtcgatacccgtcccgcatggcccgaagcactggggtacggtgcactggtctatggcggcagcatcctgctggcgtggttgtgcctgcgtctgtacgacgaaccggtgcgcgggtggctcaaacgccgcttcatgcagcgcaaaccggtgcaggggtaattttgtcgcacggacgactccagccggagtcgcgttttcgtgtcgtcagttcgatttctccgtcagtttctcctgcacctcgtacgcttccgcgatcaggtcgcgcggatagtcgtacatttccagaatccggatggcgttgcgggtggtgagcggtcccgtgtgcagccggtagtcgaagaccagcttcccgccgatcacctcctcgcggaaatggtgcagttcgtagccgtctttgcggagcagctccgccagctcgacgtcgtgcgtcgataccagcacgagatgcggtccccggttgagatgcgccagtacggcttttccggcggcgatgcgttcggtcgtgttcgtgcccttgaaaagttcgtcgagggcgaacagacacggcgccggctcctgcgatgcgtcgatgaaccgtttgacggtcagtacttcctgcaggtaatagctcgtcccttcggcgatgtcgtccgagatgcggatcgagctgtaaatcttcatgtacggagccgtgtaggcctcggcgaagcaaatgtcgagcgtctcggccagcagggcgttgagcaccagcgtgcggatgaacgtagtcttgcccgacatgttggagccggtgagcagcagccccgtgccgtccagctccagcgtgttgggcacgcagttctcgatgagcggatgtacgacctcctcggtccgcaggtatttcccgtcggtgaattccgggcggcaggtcggcgtttcgccgcgcaggcgtgccgccgaaatcgcggcgtcggtctctccgatgaaccggaacagtccgtggatggcgtcgcggcgcgctatgatgctgccgatgaagcggtggaagagaatcacctcgacgttgaaggccgccttcagcagttcgagcaccagccatacggccgcggccagctcgttggcgctgtcgccctgcgtgccgaccacgcggctgcgccgttcgacctcggagacctgacggatgaccttcagggcctcctccgtgccgggaacctcctcggccgcgagatgccgggcggtccgcagcgccagcgacaactgtttcacggccgaagcatagatcgaaatgttgagcttgttgctgtaatggatatacatgttcgcggcgaagacggcaaggaacagcaacagcagcagcggatagagaaagctcagcagcagcgacagcacggctgcggccgagagcaggtagacgagagcgatgcggcgcacctgctccggtttgtcgaaaatcaggttttgcaggtcgtaggcgtcgtcgtccgagagccgcgaaaggtgtttcgcgcattgttcggcatgtccggtgttcccggcgaaatgatccgtcctgcgaccgaactcctgcacctcttccgtgccgcgcagggtcctcagacgggcgtacaggtattgctgtcccggtttggaggcggtgcggtcgatacgctcgaatacggcgttgaggtcgaggtcggccgtggtctcggcgtcgatggtctgaaaagagctctcttccgaagagacgttgtagaaataacggcttgtcaggtcgaaattacacgcggcccgtttttcgccggatgctccgggaagccccaaaaaggttgtcaggtatgcagtaggtttcatggtcgcgtgtcggttgttctggcgtccgaccggaacggccggtcggatgcggggcggtgggcaggggggccgtatcgcatgcggtcccacattccgtgccgcctctgcgttaatattgcggtgcggcgttcatcgccttggcgatgccttcggcgatctgatccagtccgccttggagtttgccgccgatcatcattttcatcatcatattcagctcgatgtgcagcaccagccgcatgcgggtgtcggtgtccgagaccttgtggagctggatccagaatgcgaagtccatcggcactccgccgccgtcggcgacgatcttgacgtgccggggcgcttcgcgctcctccatgcggagctttacggtgaagcctttggctttgaacgagcaggtgtcttcggtcgcctgccactcctcgaccttgtctgccacggcgggcgtcaggttgtcgaaacggctgatgacggcgtaaatctgttcggcgggacgcaaaatctgttgctgtttggagatgtattcctgcatggttgtatttaatgggtgaatcggatttcagcgcagggccggcctgagtttatcccttccggagcctgccgcctgcaaaagtagtgatttttcgcgggacgggcaaattgtccgccgccgggggcggaacatgaaccgcccggcaacctgcccggtgtagcggggcgtgttgccggacgtatgtgcaggctcggagtgtcagtcgatctcgaacgtgcgggccgtgtcgctgtccacggtgatgcgtaccgtcatcacgttgtcgggcagcagctgctcgatcttttcgggccattcgaccagacagaggtcgcccgaatagaaatactcttcgtagccgaagtcgtaagcttcgcggacgtcgttgatgcggtagaagtcgaaatggtggatgcggcggccgcccttgcccttgtactggttgacgatggcgaacgtggggctggttacggtgtccgtcgcgcccagctgcgcggcgatttcgcggatcagcgtcgtttttccggcgcccatttctccgcggaaggcgactaccgtgcggcggccgagggcttcgatgaccgcttcggcgacgtccggcaggtcgtcctgcgaggtgatatggatggttttcatctattgtttgggttttaagacgatgtagggcacgatcatctcttccatcgagatgccgccgtgctggaatgtattgcggtagtagcggatatggcggttcgcgtcgttgttgtaaaccagaaaatccgaattgtaggcgaagatgtagctcgacgtgaggttgctcgacggaagctgcacgtcttcgggcttgagcacttcgtagacgtcgcgggagttgtaggccaagttgcggcccgttttgtagcgcaggttggccgaagtctcgcggtcgccggtcaccttcaccggattgtccacgcggatggtgccgtggtcggaggtgataaccaccgtgtgtccccgttccgagaggagtttgaggatggtgtagaggtccgaatgttcgaaccacgagcgcgtcagcgagcggaacgccgcgtcgtcctcggtgagttcgcggatgatgtcggtttcggtgcgcgcgtgcgagagaatgtcgaggaaattgtagacgatgaccgagaagtcggcgtcgtacaccttttgtatattgtccaccagtttgcggccctgctccgggcgcacgagcttgtcgaacgagaatttccagttcttgccgttctgggccatcagccgtttgaggaactcctcctcgtactggttctttccgccctcctcgttgtcgttgagccatttgttgggcatcagcttgtcgatggccagcggcatcagtcccgcgaatatggcgttgcgggcgtattgggtggccgtgggcaggatagcgcagtagaaatcgtcctgcgccacgtcgtaatagcctctcagcagcgaggagatcgaccgccactggtcgtagcggaagttgtcgatcagcagcagcgtggtcttcggattctcgtcagccaccgggaagatgttggtgcgcatcagcgtgtgcgacatcacgggagtgtcttccgaacgcctgttgatccagttgtagtagttgcggcgcacgaacttgcagaactcctgattggcctcggttttctggtaggtcagcacctccttgatgctctggtcggtggattccgaaagatcgacctcccagttggccagcttgcggtacagcgaacaccagtcgccgaaggtctcggccatctgcagcgacgaggagatgcgtccgaattccgaacggtagtcggccgtggtctgctcggtgacgagctgctgctggtggacgttcttcttgatcgagagcagcacctgattggggttcacgggcttgatgaggtagtcggcgatcttcgagccgacggccttgtccatgatgttctcctcctcgctcttggtcaccatgatgacgggcgtggtggggcgcacctccttgatcttggggagcgtttcgagtcccgtcataccgggcatcatttcgtcgaggattatcaggtcgtaggccccttcggaagccatgtcgatcgcgtcgtagccgttgttgcaggtgtctacttcgtagcccttctgtttgaggaacaggacgtggggcttcagcagttcgacctcgtcgtccacccagagtattttgaccataccgttagcggaatttagtttgcaaaattagttattttattatcaaacgcaaaaaccgggcgtttattgagtccccgtattttccggcgcggaatataaccgcttcggcgccggcgtgcagggcgggatttccgcccctgcacgccggaattccggatggtgttttgggtatatttttgttcccaaaaggtcggggcgcttttgggcgcttagagactatgttgctgatccataattgattgccgtgtcgtccgtccgacggagtccgacggggaataattgcctgacacataatattttaattttcgggcgagttttgcccgatatttgttatcgtactgtttcagtggcaggtagaggactgcgggaaaaataatgaaaaaaaactgcggtttgttggctaaaatgtaaataaagcgtatatttgcagtccgaatgtcttcacacgaacttaataatttaatactatatagaaatgacaaaggcagatatcgtaagcgaaatcgctaagagcaccggagttgaaaaggtgcaggtacaggcaatcgttgaggctttcatggatagcatcaagacgtcgctgaccaacaagaacaacgtgtatctccgtggtttcggcagtttcatcgtaaagaagcgcgccaagaaggttgcccgcaacatctcgaagaatacgaccattaccattcccgaacacaacattcccgctttcaagcccgccaagagctttgcggcgaaggtgaaataatttaaataaataagaacctcaaaaaatcaaggactatgccaaacggaaagaagcataagcgacacaagatggctacccacaaacgcaaaaaacgtttgcgtaagaaccgtcacaagaaaaagtagggtagcactttagtgctaaacgatagataaagctaaaggaaccccaagttcttttagctttacctatttttcagcggtttttcgtgacggcatcctgcttccggggcatgggactcggtgcggagccgccgtttccgggagtcctaacctttcccgatcctcttccgagggcgtttcggggcggactccacgataaccgcaaaaaatagtccggggcctttccgcgcccggaccgcgtgccggacgacgggtccgcacggtttttatcctttggagttcgccgccacttcagaccaaaaagcggcctaaccgatttcagtattccgcgtcttcgtctccggagcgcgacacacgatatagatgaacagagaattaattgtaaacgtcaacccgaccgaaatttccatcgcgttgtgcgaggacaaggtccttgtcgaactcaacaaggagcagtgtcagaccgggttcgccgtcggggatatctacctcggaaaagtacgtaagatcatgccgggtctcaatgcggcattcgtcaatataggacacgaaaaggacgcctttatccattatctcgatctgggcggtcagtttctttcgttgcagaagctcgtcgcttcgcagcagcccggcaaacggggcctgcgcgtcgagagcatgaagctcgaaccgcccgtggagaagtcgggcaagatcggcgactacctgcaggtcggccaaaacatcatggtgcagatcgccaaggaggccatctcgaccaaggggccccgtctgacggccgatatttcgctggccggacgcaacgtcgtgctggtgcccttctcgtcgaaggtcttcctgtcgcagaagatccgttcggtggacgagaagaaacgcctgaagcggatcgccgccgccgtgctgcccaagaatttcggcgtcatcatccgcactgcggccatggaggccaaggacgaggatatcgaacacgacatccagacccagatcgaccgctggcgcaagacctgcgcggcgatcaagaaaaacacggctcccgcccagctgatgagcgagatgaaccgcgccaatacgatcatccgcgactcgctgaacggttcgttctcgcagatcgccgtggacgacgaggcgatgtacaacgacatccgcggttatatcaggcagatcgaacccgaaaaggagaagatcgtcaaactctaccgcggcaacgtgcccattttcgacaacttcgacatctcgaagcagatcaagtcgctcttcgccaaatatgtctcgctgcgccgcggcgcctacctcattatcgagcatacggaggccatgaacgtcatcgacgtcaattcgggcaaccgcaccaaggccgaggacaatcaggagcagacggcgatggacgtcaatctggccgctgcggccgaaatcgcccgccagctgcgtctgcgcgacttgggcggcatcgtcatcatcgacttcatcgacctgcgcaaggcgcagaaccggcaggcgctctacgacgaaatggtgaagctgatggctaccgacaaggccaagcacacggtcctgccgctcaccaagttcggcctgatgcagatcacccgccagcgggtgcgtcccgtggccgtggaggaggtttcggacgtctgcccgacctgcaacggatcgggcaagatcgaaccgacggtgctgctggacaagaagatcgagaaccagatttcgttccttacgcatgaccgcggtcacaaatatatcaagctggtcgtaagcccctatgtggcctccttcctcaagcagggcctttggtcgctgcgccgccgctggcagtggaaatacaaggtgcggctgcatgtcgtcgccgaccagagtctcggtatcgtcgaggtccattaccacgaccgcaaggacaacgacctgataaacaagtaaccgtatgactgcccgcgagcagctggcgcagttcgccgccgggtcgaaagccctgccccgcctgtgccgcgaatataagaaagagcgcgcaaccgtccatctgaaagagctggtcggcggcgctctttcgttctatgccgctgccgctgcggcgaaaaccgggggcgtacacgtcttcgtcgccgaggaccgcgacgctgcggcctacctgatgaacgacttctataacctgctggacgagaagcaggtctatttcttcccctcctcctacaagcgttcggtggcctacggcgccgaagatgcgcagggcgtggtgcagcgcacggcggcgatgagcgccgtgaagggcttcacgaaagggtatctgatcgtctgcacctatcccgaagcgctggtcgagcgggtcgccgacgccgaaaccctccggcgggacacgatcgccgtgaaagtcggcgacagtatctcgatcgccgtgctggaggacgcgctcgtcgatgcgaacttcacccgcgtcgatttcgtctatgagccgggccagtattcggtgcgcggcggtatcgtggacgtcttctccttctcggaaagcaaaccctaccgtatcgactttttcggcgacgaggtggactcgatccgccgtttcaacatttcgagccagctctcggccgacaaactcgaccgggtggagatcattcccaacctcaatgccggcgatggggcggcgaaggtgtcgttcgtgcagtttgcgggcgacgcggcggcctattggttctacgacgccgattacgtgctgcgtcgggtgaacgatatccgccgcaagacgcttgccgacatggaacgtcctgaggagatcgaccgcctgatgaccagccgtaacgcactgctcggcgatttggcgaactgccggatgctcgccctgcgcgacaacctgccggagcgtcccgccacggcggccgtagagttcgatacggctccccagcctaagttcaacaagaatttcgagatgctggccgacgacatgatccgcaattcgctgcgcgggtacacgacctatatcctctcggaaaacaaggtgcaggtcgagcgtctcgaaaacatctttcaccagatcggacgcgggcaggccgtcgtgcggcccctttcggtgacgctgcacgagggtttcgtggacaacgacctgaagttgtgcctctataccgatcatcagattttcgaccgctaccagcgttaccgcatcaacggcgagatcaggcgcgacgaacagatgaccgtcgccgagctgaaccagctgcggccgggcgactatgtggtgcatatcgaccacggcgtgggccgcttcgacgggcttgtgaagatcaacgaaaacggcaaggcgcacgaggcgatcaaactggtctacaaggatggagacgtgctgttcgtgaacgtccattcgctccatcgcatttcgcgctacaagtcgggcgacggcgagccgccgaaggtctacaagctgggcaacggcgcatggcagaagctcaagaacgccaccaagaaggccgtcaaggatatttcgcgcgagctgatcgccctctatgccaaacgcaaggccagcaagggattcgcatttacgcccgacagctatctgcagcacgagctggaggcgtcgttccagtgggaggacacgcccgaccagcagacgaccgtggcggccgtcaagaaggacatggagtccgaccagccgatggaccggctggtctgcggcgacgtgggcttcggcaagaccgaggtggcgatccgcgcagcgttcaaggcggccgtggacggcaagcaggtcgccgtgctggtgccgacgacgattctcgccctgcaacactaccgctcgttttcggagcgtctgcgcaacttccccgtgcgggtcgagtatctcaaccgcaccaaaacggccaaagaggtgtcgcagatccgcgccgacctcgaagctggccgtatcgacatcctgatcggcacgcacaagattctgggcaaacagatcgtattccgcgatctggggctgctgattatcgacgaggagcagaaattcggcgtggcggccaaggagaagctgacgcagctggcggtcaacgtcgatacgctgactctcacggcgacgccgattccgcgaacgctgcaattctcgctcatgggttcgcgcgacctttcggtcatctcgacgccgccgcccaaccggcagccgatcgtcaccgaatcgcacgtcttctcggaggagatcatccgcgacgccgtcgaaacggaactcgcgcgcggcggacaggtctacttcgtccacaaccgcgtcgaggacctgatgaccatgcaggggcttatcacccgcatctgccccaaggcccgcgtgggcgtggggcacggcaagatgcccgccgagaagctggagcggctgatcatggactttatctacggggaattcgacgtgctggtcgccacgaccatcgtcgagaacggcattgacattcccaatgccaatacgatcatcgtgaacaatgcccagaacttcggcctgagcgacctgcaccagctgcgcggacgtgtgggccgcagcaatcagaaagcctactgctacctgctttcgccgcccgacgagctgctgtcgtccgatgcgcgccgccgcctgcgggccatcgaggagttctccgatctgggatcgggcttcaatatcgccatgcaggacctcgatatccgcggcgcgggcaacctgctgggagccgagcagagcggattcatcgccgatatcggtttcgagacctatcagaagatcatgaacgaagcgattgccgaactgcgcgccgagggactgcatgtcgcgggcctgaacgattcggaacaggaggtggtcgagcagctgcgctatatcgacgacgcgcatatcgaaatcgaggtcgaagccggtcttcccgactcctatgtggcgcagcaggccgagcgcctgaagctctaccgggagctggattcgaccaaggacgaggaggcgctgctggccttcggagagcgtctggcggaccgtttcggccctctgccgcgtgaaaccgaggagctgctcaacgtggtgcgcctgcgctgggaggcgatccggctgggcatggagcgcgtgaaggtcaagaacgggctgatgatcgtgcatttcgtcggcgagcaggactcgccctactacaagagcgacactttcatggacctgctccgcaaggtcacgcagaatcccggcagatttgtgttgaaacagcacaataatcgtctggcgatgaccgttaggaatgtcaaagacattgaagacgcatataaaacgttgcagcagctttgaatttagtagtagatatcggaaacaccctcgtgaaactcgctgttttcgaccggggggagatcgtttttcagcgctgcgtggagcggctgcatccgtcgatgctcgaagagctgttcgcggcatggcccgtgcgccgggccgtcgtggcttcgacgcgcggcgaagtggacgaagtagccgatctgctccggccgcgcgtggagtatctgctggagttctcttcgcagacgcccgtacccatcggcaacgcctacctgacgcccgaaacgctgggccgcgaccggctggccgcggcggtcggcgccacggtgctttatccgggccgcaacgtgctgatcgtcgatttcggtacggcggtgaccatcgatctggtgacggccgacgcaacgtttcgcggcggatgcatatcgccgggcatgaagacccgtttcagggcgctgcacgactatacggccaaactgcctttgtgcgctgcgaccgaaagcgaagagcttgcggggcttaccacccggcaggccatcgagctgggcgtgatgaacggaatcgcgttcgagatcgagggttatgcggcccgcatgcgcagccaaatagaggatttatgcgtaatttttaccggaggagacgcgaatttctttgttaaacgaattaaaaatacgatatttgcaaattgtaatctggttttttgcggattgaatagaattttagagtacaatgcaagtgaagaacaccttaattaaactggttgtcattgcagccgtgatgattccctatgcctcagcggcccagacaagcagtattaacgcattctctccctacacgatgtacggcatcggcgaacagaacacgcccggcaccctgccgatgcgttcgatgggcggtgtaggtgtggccatgcgcagttcgggcgtggtcaatctgctcaatccggcggctttcagcgccgcgccgcagaagagtttcctcttcaacttcgggctggagggccagaattactacaactcccagaaggtcgacggcatgtcgaaaagcacggcctacaacaccttcaacttccacgacatcgcatttcagctgccgctggccaagaagctcggtctgggcttcagcctcacgccttacagttcggtaggctaccgcaccaaatacacccatgactacgatccgtccgatcccgtatggggcaacgtcggccgcgcgcaatacgtctatcagggcgagggcgacgtgacggaggtcaaactcggcgtcggctgggagcttttcaagaacttctcgctgggtatcgccgcgcagtattactggggcgatatcgaccgttcgttcgtgatgaccccgaccccgatcacgggcgacggctcctactcttcgacggtaggcaccgacaactacagcatttcgagcatcaagggacagatcggcgtgcagtggaacgccatcctgaatcagaaacgcgccctgacgctgggcgccgcctatgatttcggcggcgacctcaatcccacggtgacgaaaaatatctatgtgggcgacctctacaactccagcgtaaagggcgatacgacgcatttggcactcgtattgccccgtcagctttcggtgggcgccttctaccagacctccaagtggacgatgggggtggattacgtctatcaggactggggcggccgcaacaggcagaccgaatccaccggcgtcagcggaccggaccggagcgcctttgcggtggcatatgccgatacgcatacgatcaaggccggcgtggagtacacccccaaccgctacgatgtgcgtaatttcctgaaacgctggtcctacagggccggattccgttacggaacccacaaccagacctacaacggcgacaaactgggacagtatgccgtgacgctgggtatcggcgtgcccgtgaagttcctcgccatctcgtccatagacgtcggcgtcgaatacggccgccgcggttacaacttggccgaacgcctcggactggtgcggcagcagtatttcaaattctcgatcggcttcacgctctttgccggcagcgagaacggcgagtactggttcctgcggcctaaatacgattagtttttgacccgaaaatttgcacttttggagaaccggcagtaaattgcattggatttcggtacatccgacggacactaaaacatataaaattaaatacaaaaattaatctctgaccgatgaaaaacgttaaaattctgctttccgctgctcttgtattcgtaggggcgacggctctggctcaggacttcagcgctccgcagtacgagaagtggggagacacgcccgaacaacgcgaaaagaacattctgaacagcaacttcctcaaggagtcgtgcgacaaccgcgactacaatgccgctgctcattatctgaatgaactcatcaacagcgttccgaccgcttcggtctcgttctaccagcgcggcgccgtgatctacaagaacaagatcaaccgcgccaagagcgtcgccgagaagaatacgtatatcgactcgctgatgctcatgtacgacctgcgcgccaagtatttcggagaccatcccaagcagggtgccgctttcattctcgatcagaaggcacgcgagtacctgcgctacaagcccagcgaccgcaagggtatccgtgaggcgttccgtgccgcgatcgaggccggcggcgacaacaccgatcccgaaaccgtcgtggcttatttcagcaacctctgcgacgactacaagaacaccgacgaggtgctgcccgacgagatcattgccgagtacgaccgtctgacgccgttcttcgagaagaatcccaatgccaacgagtacaaggcacagttcgacgccgcgttcggtctgagcggtgccgcaagctgcgagaacctcgaaaagctcttccgcggcaagctcgaagcggctcccgacgacgaggcgctgctggcgcaggccgtggcgctgatgtcgcgcgccaagtgcgacggcgacttctatttcacgctcgcagagaaatactatgccgtgaaaccctcttcggagaccgccatgttccttgcgcaggctttccagagcaagggcgattacgccaaggcgatcaaatacctcaacgaggcgcttgccgtcgagcaggatcctgcggagcgtcagctgctgctggtgcgcatcgcgctgatcgacttggttgcaaacgatatccccggagccgcttccgctgcgcgtcaggcccgcgacctgaatcctgaggacggcgtgccctattacgtgctggctcagtgctatgccatttcggctgccaactgtggcggttttgccggtcaggctaccttctgggccgcttacgacacgatgtcgaaagccatcgaactgctgcctgccgattcggaatacatcgagtctgccaaaacgtcgctgaatgcgttccgcagccgtttcccgacctcggaggagtgcttcttcaacgagctgcaggccggttcccgctataccgtgacctgcggtacggccgccggtgtcgtgacttccgtacgtccccgttaataaatgaacaggctcatcgcaagatacgccatggtagcactctccgttatggggagtgctatcttgctattctcctgcgaacgcgacgaggcggaggatgctgcggcttccgaagagacgatgagaaccgaatacagtgaaaatctgtcgatcgtcgaatcgcagaacggccgccgttcctaccatttcgtaactccgctggtcgagggctattcgctggcccgcgaaccttaccgcgagttccgcaagggagtcaagatcaccacttacaaggacgattcgctctccacggtcgatgccgtgctgacggccaattacgccatctactacgagaaccgcaaattgtgggaggccaaaggcaatgtcgtggtcgtcaaatcggacggcaagaacctctacacgcagcagttgttctggaatcagcagaccaagaagatctattcgaacgtcgattcgaaaatcgtgcagaacgacggacgcgacgtctttatcggcgaaggtttcgaatccgacgaggagttcaaggactggcgtttccgccgcatgaaaggccgcatggaggtcgaggtcaaacccaccgaacaggaggtcgaggtcgttcccgactcgactgccggctcccggacgggggcgtcgggacctgtccctgcgccgcagtccggtaaaaccgccgctgcatccgtcggccaacccatgcccgaacccgctgtcaagcccgccgtcgctccggttccggcccggcggcccgttcgcaaggatgcgcccggcagaccggcgcccgcaggggagcctgccgaagcccggcccagaacggaacagcagcagatgaagccggtggatctgaaactggacgatgacgagatacaatcaacccaataagagatgcttacttcggtcatactgattgtcctgatgctgttgctgtcggcattcttttcgggtatggagatcgcttttacgagcaagaaccgcctgaaactggagatcgaccgcaagcagagccgcatgttcgaccgcatagcggatatattctcccgccaccccggacagtatatcaccacgattctggtgggcaacaatatcgcgctggtcatctactcgctctacatgtcgctgctgctgcgcggtattttctacgcgctggggtgggagagcatcgcccggaacggttccgtggcgatcgaaaccgccgtttcgaccgtcatcatcatctttttcgcggaattcctgcccaagtcggtcttccgcaacaatccgaacttctattaccgcgcgctggcgccggtaatctatttcttctatttgctgctctatccgatcgcgcggctgacgacgctcatttcgcacggcatcctgcgcctgacgggccgccgcgtcgaagagcggacgacgacgcacagtttcgaccgcgaggacctcgcgtcgctgctcgacaccaacagttccgagccgcgtcccgaacccgacaacgagctgaagctgttccagaacgcgctggatttcgccgacctgcgggtgcgcgactgcatggtgccgcgcgtggacgtcgaggccgtggacatcgacgatacgaccatcgaacagctcacggcgcgtttcgtcgattccaagtattcgcgcatcttcgtctggcgcaagagcatcgacaacatcatcggctatatcaactcgaagagtctgttcacccgtccggccagtatttccgacgtgatgatgcaggtcaatttcgtccccgaaaccatgccgctgcaactggtgctgcagaactttatcaagcatcgcaccaacatcgccgtggtgatcgacgaattcggcggcacggcgggcgtcatttcgctcgaagacgtgctggagcagattttcggcgagatcgaggatgagcacgacgtgcccgacctgaccgaaaagcaggtcggtcccgacgagtatgtcctctcgtgccgtctcgaagtgaaatacctcaatgagaaatacggtctgggtatcgaggagagccgcgaatacgatacgctggcgggtttcatcatcttcaattacgaggggattcccacggccggagagaccgttttcgtcggcggtctgcaggtgcgaatcctgcgtacgacgcgttcgcggatcgacttggcgcgggtccggaagttgtgagaatttttatggcataataagggccttttccgaataaatttactacctttgactgctaattcgaaacaatacgaataatttacaatttatatggcaagtttaaacactttacgcaccaagttcggcatcgtgctgtcgattgtcatcgcaggcgccctcttggctttcattctctccctgaagaccgaaatgggcttctcaggcaacgacccccgggtcggtgttatcgacggtgaaaagatcaactattcggagtattacaaccagtacgagcaggtcaaggcgcagagcggtgctcaggagagcaacgaacagcagtcggcgatgcttgccaacgctgcatggcaggccctgatcggcaaatacgtgctgactcccggattcgacaagatgggccttcgcgttaccgagcctgaacgtatgtcgatggtcagcggccagcatccttcgcaggctttctacaatgccttcgcggatccccgcacgggtgagtacaacgtcgccgccgttcaccagttcctctccgaggccgaagccaacgcgcaggcgcagcaggcttgggcgcagctcaacgagcaggcccgcatggagcgcgaggtcgccaagttcctcggcctgatcaagggcggtgtgtatgtcaactcgctcgaagtggccaacggtgtgaactccgccaacaacacctatgccggcaagtgggccggtaagaaatactcggccgttcccgattcgctgattcagctcaagtcgagcgacatcaaggcgtattacaacagccacaagaacatgttcaagcagacgccgtcgcgtgcgctttcgtatgtcgtgttcgaggtttctccgaccgacgacgacatgctggcgctcgaaaagagcgtcgccgaggtcggcgcgcagttcgccgccaccgaagagctgaagtcgtttgtccgcgccaaccgcaacggcaaaatcgccgacaactacgtctcggcgaagcagctttcggaagaggaggccaaggccctgctcgacggcgccacctacggtcccgtactgaagaacaacgagtggacgatggcccgcgcgctggataccaagatcgttcccgactcgatgggcatccgccacatcgtacttccctatacgcaggaggcgctggccgacagtctgctgaccgtgctcaagggcggtgccgacttcgctcaggtcgctgcgcagtattcggtttatgacgctaccgccgccaacggcggcgaggtgggcgtcatgccgttctcggccttttcgggcgaattcgctgcagcgcttgccaatgcgaaaaccggcgatatcgtgaagatcgcttccggcgacgccattcagctgatgcaggtttaccgtgccgacaaaccgtcgaagcacgttcaggtcgcttcgatcacctacccggtcgaggcttcggccgctacccgccgcgacatccacaatcaggccggcaccttctcggtgaacgccaaaggttcggtcgaagcgttcaacgacgccgcttcggctgccgccgttacgccgcgcatcgcgtcgctggcgcagggcgagcgtacgatccgcggtcttgaggattcgcgcgacgtcgcccgctgggcttacggcgccgaggtgggcgatgtttccgaaatcttcccggtaggcaaggattatgtgatcgccatgctgaccgagatcgacgacaacgaattcgctcccctcgaaaaggtttcggcacagatccgtgctcaggtactccgcgacaagaagtacgactatatcgtgaaggaactctccggctccacgctcgacgagcaggccaagagtctcggaaccgaagtcgcagacttcgacaacgtgaccttcggggctttctatgtgaacggtcccggtttcgagccccgtctgatcggcgctatctcgtctacgaccgagaaaggcgttctctcggctccggtcaaaggtctgagcggcgtatatgtcttcgaggtggatgacatccagacctcggacaagcagactgccgaaggcgagaaggtgcgtgcgcaggctatggccgagagcatggcccagcagttctcggtgcaggctatccagcagatggccaagattcaggacctgcgcggaaaatatttctaaacccgatttttcgagacatagaaagaacgccggagtattccggcgttctttttgttatttttgcgtatatttaggagccgtattaaaacttatcgcataccgttatgaataatttcatttatcacaatcctacgaaactggttttcggcaaaggacagatcgccagactcggcaagttgatccctgccgacaagaagatcatgattaccttcggcggcggcagcgtgcgccgcaacggggtttacgatcaggtcgtgaaggcgctcgaagggcgcgactgggtcgaattctggggcatcgaacccaatccctccgtcgagacggtccgcgaggccgtggctttgggccgtgagaacggttccgacttcctgctggccgtgggcggcggatcggtcatcgacggtacgaaactcatcgctgcgggcctgctctacgacggcgatccgtgggatatcgtgctcaaggggcaggcggataaaaccgttccgctgggcaccgtcctcacgatgtcggccacgggttcggagatgaattcgggttcggtcatttcgcgtcaggaaaccaaggagaagtacgccttttacggcgattatccggtcttctcgattctcgatcccgaaaccctctactcgctgccgcagcggcagatcgcctgcgggctctccgataccttcgtgcatgtgctggaacagtatatgaccacgcccggccagtcgcgcctgatggaccgctgggccgagggcatcctgcatacggtgatcgaaatcgctccgaaaatctgggagaaccagcatgattatgccgtgatgtcggagtatatgctgggggcgacgctggcgctgaacgacatgatccgcatgggcgtgacgcaggactgggcgacgcatatgatcggtcacgagctgacggccctgcacggactgacacacggtgcgacgctggcgattgtcatcaatggcaccctgcgcgtgctccgggagcagaagcgcggaaaactgctccaatacggcgaacggatctggggcattgccgacggttcggaagaggagcgcatcgaccgtacgctcgaagccaccaaaaaattcttccgttcgctggggctttcgacccggctttcggaggaggggatcggcgaaacgacgattgcggagatcgaacgccgcttcaatgcctccggcgtcaagtacggcgaagcgcagaacgtagacggcgccgcggcgcgccggatactcgaagcgtgcatgtaggccgttcgcaccggatttaagcagaggggctgtctgacaagtccccgaaattggaaatcacccctgccagagttttatctgacgggggtgaaattctaaaaatcggacttgttagacagctccttttgttgtcggaggtgcgcttcgtgtaaatcggtcggtttttgcgaaagcagggaatttcgtcatagtccgcctttccgctcttttccccgaacggataaaaaataccctccgggaaaccggagggtatcgctattgctttcagtcgctttagtcggcgagcagaatttcgagtatcttgatagctgcggtggcgatcggcgtaccggggccgaagatggcggcggcgccgtccttatacagctggtcgtagtcctgtgcggggatcacgccgccgacgatgacgatgatgtcttcgcggccgagcttcttcagctctgcgatgatctgcggcacgagggtcaggtggcctgcggccagcgacgagacgcccactacatgcacgtcgttctcgacggcctgcttggcggcctcttcgggagtctggaacagcgggcccatatcgacgtcgaagccgatgtcggcgtaacccgtggcaactaccttggcaccgcggtcgtggccgtcctgaccgagcttggcgatcatgacgcgcggctgacggccctctttcttggcgaactcggcgcacaactccttggcgcgctcgaactgtttgtcgtttttcacttctgaactgtatacacctgagatggaacggataactgctttgtagcggcctacgacgacttcgcaggcatcggagatctcgcccagcgaagcgcggaccttggcggcctcgacggccagctccagcaggttgccctgcttggtcttcacgcactcggtgatcgcggccagcgccttcttcacggcggcttcgtcgcggttggcgcgcaactccttcagacgcttgatctggctctcgcgtacggcggtgttgtccactgcgaggatgtcgatcggagcctctttttccagacggtattcgttcacgccgatgatcttctcggtgccggagtcgatgcgggcctgcttgcgggccgctgcctcctcgatacgcatcttcggaatgccggtctcgatagccttggccatgccgcccagcttctcgacctcctgaatacgctcccaagccttgtcggcgatctcctgcgtcagcgattcgacgtagtacgaacctgcccacgggtcaacctcgcggcagacgttggtctcctcctgaatgtaaatctgcgtgttacgcgcaatacgcgccgagaagtcggtcggcagggcgatcgcctcgtcgagggcgttggtgtgcagcgactgggtgtgtcccagtgcggcgcccatggcttcgatggccgtacgggccacgttgttgaacgggtcctgctcggtgagcgaccagcccgaagtctgcgagtgggtgcgcagggccaacgatttggggttcttgggatcgaactgcttcacgatcttggcccacagcatacgcgcggcgcgcatcttggcgatctccatgaagtggttcatgccgatggcccagaagaacgacaggcgcggtgcgaaggcgtccaccgacatgccggcgttgatacctgcgcgcaggtactccagaccgtcggccagcgtgtaggccagctcgatgtcggccgttgcgcccgcctcctgcatgtgataacccgaaatcgagatcgagttgaacttgggcatgttcttcgaggtgtactcgaagatgtcggcgatgatgcgcatcgagaactcagggggataaatataggtgttgcgcaccatgaactccttgaggatgtcgttctggatcgtaccggccagctggtcgagtgtgcagccctgctccagtccggctacgatgtagaaggccagcacgggcagcacggcgccgttcatggtcatagacaccgacatcttgtcgagcggaatgccgttgaaaagcaccttcatgtcctcgaccgagcagatcgacacgccggccttgcccacgtcgcccaccacgcgcgggtgatcggcgtcgtaaccgcggtgcgtcgccaagtcgaacgccaccgacagacccttctggcctgcggcgaggttgcggcggtagaatgcgttggactcctcggcggtcgagaaacccgcatactggcggatggtccacggacgcatcacgtacatcgtcgagtagggaccgcgcaggaagggggcgatacctgccgcgtagttcaggtgctccatgccttcgaggtcttcggccgtataggcgcccttgacgggaatgcgttcggccgtcagccacggctcgacctgtccgcagcctttcgaggcgcagcagctcttctgctggcctgcgtcatatgtcagttctgaaaatttagctctcatgattagattcccatctctttaaggtagaatttaagtgtttccaagacgttcgacttcacgttgatgaagttggtgatgccctgcgcttcgagttcgggtgcgcaggcgggcgctccggcaaccacgaggatcgccttgccgcagagcagctccttgattttgggagcggcctcggcatagtcgtcgtcgctggcgcagaccacgacgatctgggctttcgactccagcgcggctttcacgccctcctcgatcgacttgaagtaggtgttgtcgatcaccttgatgccggcgcatgcgaagaagttgcacgagaactgcgagcgggcgcgggccatgcccagattgccgcacgtcagcatgaatgccttcggctccttgccgctgcgatcgacatgcaggcgcatctcctcgaacgccatggcgccgcggtagggaacgagcacgttgccctcggcctgcttgcgcgtaacggactcggcggtgatctccttgccggcgacctccgtaaagttgggatactggttggcgccgagcagtatctggcggcgcgttgcgatgttcttgtccttggctgcagccgacgctttgatgcgctcggcgatgaagcctgccttgtaggcttcggtgtagccgcccttctcctcgatttcgaggaagagcttccacgcctcggcggcgatcgactgcgtgaggttctcgatgtagtacgaaccgccggccgggtctaccacctgatcgaagtgcgactcgtgcttgagcagcagttcgacgttgcgggcgatgcgcttcgagaactcggtcgggttttcgaacgatgcgtcgaagggcgtaacctccagcgaatatacgccgccgattgcggccgacatggcttcggtcgtgccgcgcagcatgtttacataggggtcgtatacggtctggttccacttcgacgtctcggcgtggatctgcatcttgcaggcgcagttcttttcgggattgtagcccttgacgatgttggcccacagcatgcgcgccgcacggaattttgcgatctccatgaagtagttggagcttaccgagaacgagaagcgcagcttgcgtgcggcttcctcgatcgtcagtcctgcgtccatcaggcgtacgaggtagtcatggcctgccgaaaggacgaaggccagctcctcgacgatggtcgaaccggagttgccgaagatctgacccgatacggtcaccacgcggatgtgcttgtactctttggtcttgcggatcagctctgcgatgcgggcgaagcacttctcgccgttgggcgagcagaagtcgcctttggtcgagaggcccttgaccagcgggtcgatgcagaacgcgatgcggacatcctctttggcgatgccctctttttcgatcttcgccagtacgagttcggctacgtcagccgttttctgaccgcagaaggtcagctggacggccggaatgcagatctcgccaagcagcgtgtcgaggtcggcggcggtgaaagcctccgacgcgatgcagaagccgagcgaatcgacgcctgcgttgaggatcttcagcgcctcggcgtttgcctccttggggcatacgacgcttacggtctgatgtacgcgccagcggttgtgtgcgcgtgtaccccgtacgtaagggaactcgcctgcctgcgagcccagaaacttgatgccttcgaggttctcggcgcggtagtagggacggacgttgaatccttcgcccgttttccataccagtttgcgctcgtaatcagcacctttcaggtcggccgtaatcacttcctcccacttctcggtcgggaccggcgggaattcggtgaacagcttttcacgtttggtatttgccataactatttagagattagtataagtgttgtttcaaaattgcttgtaaaggtacaaaattattaatgattgaaacaagaaattgttaataaaataacactgtataatttctttttataatgtggtgcatttcgtttactttcgccagcgggctgaacggtcgattccgtcggaggtgaaatagttgaaatatgttctttattgcttctgttttgcggagaaaccaaaaattgcgatttttgggatttcggtgaaaaaatgaggtatttttccggaaaatggcgtgaaaattcgggctgattgctgaaaaatggccttgtttttcggaaaatgttgaaaaaaaatcggtgtttttcgaaaaatagccgtttttgtaaaaacaacgtaacggaaaaataattacatttgcaaccagataacaatacatacggcggcgggggagaagcctccggttagttaggtcggagagagcctgccgcgaggcagttgtccgttgaatttcaggttaggttttagtttagcaattatttcggtttctcccctgcccgtatgtttttcggaacactaatccaattcagttgattatgtcatcattactcagattcaagatggtcgatgcggctataaaccacaccgccgtcgaggttaatgcccccgaaggacgtccgtcggactatttcggcaagaaggtgttcgggcgcgccgccatgcgcaagtacctgaacaaggcgacttacgaagcgttggtcgatacgatggaaaacggcacgcgcctgacgcgcgaggtcgccgacagcatcgcggcgggcatgcggcagtgggcgctggagcacggcgcggaccactacacgcactggttccagcccttgacgggcggtacggccgagaagcacgacgccttcgccgatcccgacggctgcggttcggtgctggaggagttttccggcaagctgctcgtacagcaggagccggacgcgtcgtcgttccccaacggcggcatccgcaatacgttcgaggcccgcggctattcggcgtgggacccgacgtcgccggcgttcatcgtcgatacgacgctctgcattccgaccgtcttcatcgcctatacgggcgaggcgctcgattacaaggtgcctctgctgcgttcgatcacggccgtgaacaaggctgcgacggaggtgtgccgctacttcgataagaacgtgcagcgggtcgtgtcgtatctgggctgggagcaggagtatttccttgtggacgaaagcctgtgggccgtgcgtcccgacctgatgctcacgggccgtacgctcatgggccacgagtcggccaagaaccagcagctggaggaccactatttcggtgcgatcccgacccgcgtgatggcattcatgaaagacctcgaatacgaatgcctgaaactgggtattccggtcaaaacccgtcataacgaggtggcgcccaatcagttcgagctggctccggtctacgaggaggctaacctcgccaacgaccataaccagttgctgatgaccgtgatggacaagatcgcccgccgtcaccggttccgcgtcctgctgcacgaaaaacccttcaagggtatcaacggttcgggcaagcacaacaactggtcgctgggcaccgacacgggcgtgaacctgttcggaccgggcaagaccgcttcggagaacctgcagttcatcaccttcctcgtgaatgccatctccgcggtctacaagttcaacggcctgctgaaggcgtcgatcatgagcgccacgaacgcccaccgtctgggcgccaacgaagcgcctccggccatcatctcgaccttcctcggcacgcaggtttcggccgtactcgacaaactggccgccagcaagggcgacgacgcgatccgtttcgacgccaagaacgtcttcaagatgagcggcatctcgcacatcccgacgctgctgctcgacaacaccgaccgcaaccgcacttcgccgttcgcctttacgggcaaccgcttcgagttccgcgccgtgggttcgtcggacaactgcgccgaagcgatgatcgtgctcaacacggcgatggcctacgagctgacggagttccgcaaaaaggtggacgccaagatcgaagccggcatgaagaaggagaaggccatttacgaggtgctgaaacagatgatcaaggcctgcaaggcggtgcgtttcgacggcaacggctattccgacgagtggaaggccgaggcgaagaagcgcggtctggactgcgagacctcgacgccgctgattttcgagcgttacctcgacaaggcgaccctcgaaatgttcggttcgatgggcgttttcaccgatgtcgagctggaggcccgcaccgaggtgaagtgggagacctacaccaagaagattcagatcgaaggccgcgtgctgggcgatctggcgatgaaccatatcgtgcctatcgcgtcgaaatacgaagccctgctgctggacaaggtctacaagatgtcgcagattccgggactgaacgcttcggccgacattgcgctgatcaagaagattcagtatcatacggcggagattcagcgtcttacgggcgaaatgatcgacgcgcgcaagaaggccaacaagatcgagcagatgcgcgaaaaggcgatcgcctaccacgatacggtgtcggttttcttcgacgagatccgccgccatatcgacaagctggaggagatcgtggacgaccagatgtggccgctgcccaagtaccgcgagctgcttttcctgcgctgatgcgctccatagtaaatagtattgacgtattgtgcgataatccgggcttgccgcccggattatttctttatctttgcttccccggaggttgcgaatagtgtgcggccgccggattgattataataagtatggagtatttgaagagttggtttcgcggattcgagcaggggattgccgatttgcaaccgcagcagcgggaggtgctgttccgtgcgtgcgccgtaaactgcgtgcatggaggaccgttcggactctaccgcagtctgttcgaggcggcggagggggatttggaccggttttttgtgaaaatagacgaactggagggcgttcgtggcgaaagcgtgtgtgcgggacgggagtacaacctctgtttcgaggcttgttcctgtgccctgcaccgtgcggggtgcgtgaatacgccgatgttgtgcgaatgttcgcggcaaagcgtgctttacgtaatgtccgaattctggccggatcggaaattcggggtggaagtccgcgcgtcgatcctgcggggcgcgtacgagtgcgtgctgaatgtccgggtcgaatgacggaccggcatgcggtcgccggggcggaaaacggttctgccggacgcagctctggccggtgacgcgtccgctgcggtgcccggtggcggaatccggccccgcgcctgatattgtgccggataccgtgccgccgtcgcgcttgatctcctgcccgataccgcgctccggaccgtgtccggtgtcgcgctgataccgcgtccgctgcggaatcgtgatttcataacgcggataaccgttttttttgcatttattttttacttttgttttcatgaaaatcattgccgacagcggatcgaccaaatgcacttggctgctcaccgacggcgtgcatacccgcgaggtgcgcacgcggggaatcaacgccgtgcagcactcgccggagcagatacgcgaggcccttgcggaacttccgccctgcggcgcggccgaagccgtctatttttacggtgcagggtgcggacatacgtttcccgacgcgacggcgaagatggtccgggcgttggcggaccgtttcggtgcggagcatgtcgaagccgaatcggacttgctgggcgcggcgcgggctttgttcggccggggcgaaggcgtggcctgcatcctcggcacgggttccaattcgtgctggtgccgcggcggcgaaatcgtggaaaacgtaccgccgctgggctacgttctcggcgacgagggcagcggcgcgacgttagggcgcaacctcgtgaacggcatcttcaaagggcatatttccctgcgcggcgagtttctcgcggcgcacggactgacttacgaggagatcatccgccgggtttaccgggaaccttacgccaaccgttttctggcatcgttcgcgccgtttgtccatgcgcatctggaccgccccgatatcagggacatggtcgagaggagcttcgccgatttcgccgagcgcaacctgagcggttatcccgtccatctgcccgtggcgtgtgtgggcggcgttgcggccgctttcggggatttgctgcgcgaaacgctgacgcgctgcggccgcgaggtggtgacgatcgtccgctctccggcggccggattgacagaatatcattatggaaaacagaataaccgaacaggcttcggcctatgacgatttacagcggatgtcggtgcacgacatcctgacgggtatcaaccgcgaagacgcgcgcgtgcatgaagccgtgcgtacgacgattccggtgatggaacgtttggtcgaacgcatcgtcgagcgcatggagtgcggcgggcgcatgttttatatcggtgcgggcacgagcggccggctggccgtcaccgacgcttcggaactgcccccgacctacggcgtgccgttcgaccgtgtgatcggcctgatcgccgggggtgacggggctttgcggcgggccgtggagcatgccgaggacgacatggaaggtgcgtggcgcgatatggcgccttacgctccgaccgggaaggatgtgctgatcggcatcgctgcatcgggaacgacgccttatgtgattggcggcctgcgcacggcgcggagacacggactgcttaccggctccataacctgcaatcccgcctcgcccgtggcggccgaagcggagtatgcgctcgaagcggtcgtcggtcccgaattcgtgaccggctcgacccgcatgaaggcgggcacggcccagaagctgatgctcaacatgctctcgaccgccgtgatgatccggctgggccgcgtcgagggcaaccgcatggtcaatatgcagctcacgaacgacaaactcgtggcccgcggcacgcgcatggtggccgaagcttcggggctggacgagacgcgggcacgcgaactgctgctgcgttacggatcggtaaaaaaggcattggagcatgtaccggagtctgaatgaatatatcgcgcggctggagcgcgagggtgaactggtccggatcggggcgcccgtatcgcccgtggaggagatcgccgagattaccgaccgcatctccaagacgccgggcggcggcaaggcgctgctgttcgaaaataccggcacggcgtttcccgtgctgacgaatctgttcggctccgaacgccgcatggcgctggcgctcggcgtcggaacgctcgatgaactttcggagcgtatcgacgtcctgctgaagcaggcagccgcgccgcgcaattcgctctcagacaaactgcgcgccctgccgatgctggccgagatggtgcgctggtttccccggaccgtgtcgggccggggcgcgtgccagcaggtcgtgctgaccggcgccgaggcggcgctctccgcgcttccggtcctcaaatgctggcctgcggacggtggccgcttcgtgaccctgccgatggtcaatacggtcgatcccgaaacgggcgtgcgcaacgtcggcatgtaccgcatgcaggtcttcgacgaccgtacgacgggcatgcactggcatgtccacaagaccggagcgcgccattacgacgcttacaagcgtctgggccgccggatgcccgtctcggtcgcgctgggcggcgatcccgcctatacctacgccgcgacggctccgatgcccgacaacatggacgaatacctgctggccgggttcctgcgccgccgtccggtgaaactcgtgaagtgcgttaccaacgatatctatgttccggccgactgcgacttcgtgatcgagggctatgtcgatccggccgaagagaaggcggtcgaggggcctttcggggaccatacgggcttctattcgctcgaagaccgctatccgcttttccatgtcacggccctgacccgccgacgcgatgcggtttatccggctacggtcgtcggcattccgccgcaggaggacgcatggatcgcccgcgcgacggagcggatctttctctccccgatccgtatggccctgcagcccgaagtccgcgacctgacgatgcccgaagccggtacggcccacaacgtcgccgtcgtttcgatcgaccgccgttacgaggggcaggccgtgaaagtcgcccagtcgttgtggggcgcgggacagatgatgttcaacaaatacctgctcgtcgtgccgtcgggtaccgacgtgcgcgattccgatgcgctggcgcggctgttgcggcggatcgaccccgtgcgcgacctcgttcgcagcgagggaatcctcgatgtgctggaccatgctacggcgacgcccggcttcggcggtaaaattgcaatagacgctaccacagccggagctgcgctgaaccccgcgtctcagtcggaatccgtaccgcaactctctctgccggagggctgccgcaccgatctgctcgaaaagtggggcgcggcgcttgccttcgcggaaccgggggccggggttcgaacccctgagggggtgcgatatttcgtgctgttcgaccccgcggcggcggagctgatgcccgaagagctgttgtggctcgcggcggccaataccgatccgcggcgcgacgtgcggacggagggggcgacgctcgtgatcgacgcgcgaagcaaacggcccggcgagggcggcaatccggcgcggtttcccaacgtcgtgacggcgtcggaagcgaccgtcgggctggtcgatcgccgctggacggagtacgggctgggtgcttttgtggagtcgccctcgcggcgttaccgccgcctgctgctctccggcggtgcgcagtggtaggttccggcatttgccggacggtatgtaaatagtctctgcatatgggaaagttttttacagaacgtgagattcgggccgtggcggtttttctgccgctggccgggttgctggtcctcggcatcgtcctcgtgcgtccgaaggccgatcccgcggcggccctgcgggtcgaagccgaaatggaggagcgggccgatacggtcatcatgcagcccttcgatccgaacaccgtagattacgacggcctgcggcggctggggcttacgaaacacgaagccgtgagcctgctgaaataccgcgccgcaggcaagattttccgtattcccgaagatgtgacgctctgttacggcatcagcgattcgctcttttaccggctggagccctacatacgcatcgggcgcaagtatgccatcgctccgcaggagtaccgcacggggcgcgtcgtctccgagccgatgccgcccgcgccgttccgcatcgacacggtgagcgcgcgttacctgcgggccatcggcgcattgtcgaaacggcaagccgaagcctttgtccggtggcgcgacctgagcggcatttacgacatggaggagctgcgggcgtgctatgtggtgagcgattcggtcgcatcggcgctcgaaccttacgtcatcttccccgaacgcaaagcggaaccgatcgacgttcccgtcgagatcaacacggccgattcggccgcgctgaggagcgtggcgggcatcggcgagaagaccgtcgtctcgattatcggctaccgcgaccggctcggcggattcctccgcgcggagcaactcgcagaggttccgggagtcacggaacgcaattacgaactatattaaaaaatgcggaaaaagagtaataatatcggagaatggttcctactaaggtctgttggagacgaatccgtcgatatactctttatcgtgcgcgacaacagcaaaagcctgcctgatgagcttgtttgcgacagcgatcatagcgagttttcccgattttccgttttgcctgagcctcgtataggtctctttgcattgggcattgaacctactggcaggccaagcggcgatatagagaagtcctctagtgtatgcgtctccgtttcggttgatatgccctttgatgtttaccgaagttccggactgttcgtaagtgggacaaattccgagataccgggacacctgcttggcattttggaagtaggtaaagcctccagtagtgatgatgagcgccgtggcaagcgttatgcctatccctttgatggtcgtcagcagcgcgagttgtcggctgaactccacttcgacaagatccgtgagttccgcctggagcctgtcacgcttcttttcaaggaacttgatagtttcgtctacggtatgagttgcacctttgtccgggacaggcagacatgcaagagagccacgaaggttcgacatggcggtaatctgcttagtaagttggcgaatgacggttcttttctgtcggagccgcaggatggcctctccctgtaccttgaaaggacgcgggttcatcttctctccgtacaaggtaatgagtcgtgcatcgctcttatcggtcttgaccgtagagagcaaggctttggcgaagttctttaccttcagcggattctccatgctgacagtaattccggcgacattgagcatatacagcagcaaggcgctgtaattccctgtcgcctccataacacagtggatactgccgtctttggggagagtcccgataaactgtctgataccagcggtcgtgttgttaaaagtacggatctccccgcctttgtcggaggagtaagctaccacgaatgtagccttgctcacgtcgattccaatgtacctcatggccgttcattttttggttttaacgacatcgcttacatcttggtccttcattgcgaatacgggctcagacaccttacgaactatccggattctgatgtaaagagtatggggtcagaacataattcccggtttagaaaaccaatgagagatcggacttattccatactctgatgtcttaactattcaaatttaattaactaattacaaatatacaatgagaaaattttgaaacaaatttactgcgatagttgtgaaattcggaaaattgatattaactttgcaagcccgaaagagttgggacggcatccgtacattccgccgcagacccttcggaaattacttaaacgaagacagttgaaaggaggttggagtaccgctgaggaattgatcgaagacgacataatgacccgcgaggaggcagcacggctggttccctatctgcggttcggtgcccgaagcggacctgacgacgagtagacgaagcgacattgcaagggggaaaggtatcggaagatatgcgccccggaggattttaagtaaacgaaagaattaaaaacaataaaaaagtagaatattatgattatcatgccggtaaaagagggcgaaaacatcgagcgcgccctgaagaagttcaaacgtaaatacgagcgcacgggcgtcctgaaggagctgcgccgccgccagtacttcaccaagccttcgatcgcgaagcgcgtggcgaagcagcacgccatttacgtggagaacatgtaccgcgacgaggactagtcctccggtgttctgcaccatatacgccccggcccgaaaggtgtgggcttgaaaaatgtaacgacttggtttatcaggtcgttacatctttgtataggagagtaggtaacagaaggcaacggtttatttttcagcccattatactgaatttcagtgtttcaaataactacgacgaactacaaaaacatacagaaaaatccaaacagtcaccattcatccaaattcttctagtgcaaaccgaattgatttaccaataactatattggtaaattcatctcattagcttgattattaatgtattaatgccatattttgtgtttttatctaacaattgacattttgagcatccagatatgagttctaactcaagtgtttcataatacgagtcacagttagataaacgaggtttttaaatcaccatctattctcgcgttcgatacatatattccgtcggtgtcatattgtatacgcttttgaagcattttgcaaaataagcgggtgaagagaatcctactatataggcgacttcgcttacattgcgccgttgatctgttaacagttgaactgccttctgcaaccggtaattacgcaataaatccgatggggacattccgaaaatacttgtgattttccgataaagcaatattctcgacattcctaacatatcgctcatcagttcgattttgaaattgctgtcgctatgctgcgcctcgatcagattgaagagtttatcccggaacacatcgtccacacaaggaagattggcggcttcgtgcctcgtcagacgaccgaatttttgggcgaatgtactggcaaggcgcttacgttcttcgataatccggataattttcagacggacatactgcatattgaacggcttgtgaatatattcgtcagcaccttctgcaattccgtaaatccgttggttgtcatccgaaagagccgtaagcagcacgatcggaatatgacaggtcgctatgttagattttatgttgctgcacaactggaatccgttgagcgcaggcatcagcacgtcgctcaggataagcgatacttcatcatccatcacggctttaacggcatcgtaaccgttattgacggcaataacgcggaagttcgttgaaagttcatctttaagataggcgagtatctcagaatcatcctcggcaatgacgattgtttcgttatatttcttggccaataactcattgaccttattgtcgtcgatcacctcgtccgcaagataattcgtcggaagagtttcgtcaaaaatgacattttctccgaaatgcgattttcccttgaacagttcgacccggaaaacggtataagcccccggaagactatccgccgttatgtatccatgatgcagttcgacatattcccgtgtcaggtgcaatccgatccccgtactgtaattcgacgtgttcttgagcgcataaaaacggtcgaaaatacgaggaagactctctttatctatacccttcccgttatcctcgacttcgatcagtacgctcggaccgttatctgtcaccgacaccaaaatcgtaccgtatttgggcgaatatttgaaagcatttgaaagcaggttgagcaacacctgttcgattttatcggtatcaatccacaactgctgatgcgacgtgtccgtacgaaatttatagacgatcttttccgtttcggcataagtctcgaaataactaagtatctcttgtgtaaactgcacgatatccacctgtttcagcgtaagcatcattttattattttcgatcttccggaaatcgagaatctgattcacgacattcagcagatggcgcgcgttacgctgaatcgtccagatattacgttgaatttcggggtccttttcccgcttgacaatgctgtcgagcggattgaggatcagcgtcagcggagtgcggatttcatgggttatatttgtaaaaaactgtaatttgtgagccgttacattctctatctgggcatgcttatccatcaactcacgggttgcaatttcgatttcagcattttttgcggtcaggatttcgttgcggcgccggagacgcagattcaatcggatggcataaatgcccattcctcccgcaacaagggcgataattatgacggcccacaatgaatatttcagattgtcaacgcttcggtcatattgttcaagaaccgttttctgtttgttgatctgttcctgataactgactatctgttcctgctgcgccttgagtgtgtaggcattgtgagaatcgacgagtgccgattgcagttggtagctcttctctacccgtttaccaagaaggatacgtctggcgatcgccatgaccttgtctcctcccgtgggatagaggaatgaggcttgcagtctgccgtcgagaaccgcatctactccgacgagcgcatctattccgataaattttatccgctgcgcacagagtgaatcggctgcattgatcacattgtaggcagctagtgccatatcgtcgttgtgcgcaaaaaccagatcgatatcgttatagtggccgatcgccgccacgcgctcttttgccacatcgggtttccagtcgccgggaatggtatgcaccgaatagctttcactcgcttcggcaaggaatcccttatgccgttccacagcgggtgaagagctcatcaatccggtaatttcgagaatcgtagacccttcggataatatggtgttgatgtagcgtcccacatcacggccgatatcgtaattatccgcactgatgcaggtcgtgtaatggtccgaatgtattttacgatcccagatgattgtcggaattcccatgtcgaaagcttcgacggcgatcggtgtcaccggctccgattcgttcggcgagatgatgagcaggtcgaccttcgcctcaatgaattcacgaatctgatcgatctgtaactgtgtattgttatgcgcattgctgaccacaatgctcaattccggatatttggccgcttcggcttgcatctgaatcatcatgatctgacgccataggtcgttggtacattgggagaatccgatcacataatgacgcttgggctccgagatcgattcacgacggcagccgttcgtcatcatacatatggcaagcagtaaaaacagacggattgtgcaatgcggcataatacgcgaatttataattattttatcatattcaggctgaaatcatcgacgaaataggttgaattccggtctgtccagacaccgcagaaaacagtgagttcctgctcctcgccggaatcgaaatccagcgccattcgggtccaatctctgccggacagcaggaacagcctgtctttcaaaacactgccgtcgggccggcgtacaccgatatacacgccgttcgtcaacgggggcagggacatgcgggcgaatgcggaaagccggtattcctttccgggcatcactattattttctgtatgcagatgtcggaccagacgggtatataacggggtgtttcgacatacaaggcgcaggcaaactctcccgcatgtgcctcggatgtcaattcggacttaccgatgtcccacatcttcgcagactcttcgaatccgccgtcggcgagcaggttttcccggccgtgcggagtgcaggcgaacagaatataacttatcagcggcaaaatggtcttgtacataaagttaggtcttaaaaacggatacccggccgtgcataacacggccggttccgccggatgtcagagttagttacagttgcgaaacgataaagtacatattgtcgcccgacgagtagggataaacggacggtgagaaccagcctccctgattagcattatcgagcgccagcagtttttcacccgaccagtcgccttcgggagaaccggcatcgcggtagaccagaccgcccgtcgtccccgaacggtaaatcataatatagcgtttgtgagtcgcattataggctacacacatttcggatgcattgccataggtgatcgccgccgctgattctgggtctcccgccacccagtcggtgccgtcccaataggtccagttggctgcagttgcaatatcaccgtcgcttttgatgcgcgcgacgtatatcttgggcgtggaacggcctgcgtccgaaccgaacatgtaaagatacttgtcgctcaaatagaatgccgcctgcacaaaatgcccggctccgctccaacggccgcggatctcacgggtccagcttttttaccgccgtctgccgatgacaacaacccggaaaagtttgccgtccatgcgtcgctgtcttcgggatcgagcgacttgaacgaataataatggatatactgtttgccgttgacggtcacaccggccgtcggaacacaggcggtttcaccgtctcccgacggttcgagaataggaacgataccgtcgttgccgggcgaaacctgcgcgatatagaatccatcagcgggattcatatcgttcgacaatgcgaatgcgtttgcgtaatgcttacccccggccgaaacatcggccagcgccatggaaaccgtattgttcggtccggcccagatgacggctttacccgcaaacgaaatatccgtaaacgaggcattcgagacagtgcccgtcgtcaggcaggtacccaatttggtcgaggtctgggtggtgccggtcggaacgagtctgaaatcgtccaatgcgacccatactccgggatagccccatgctccgcaaaagacattaccctgtgtatagtcgccggaattgaactccttggtgaattcggtccatacgtcgggattccaatcgccggcctgtccgtcatagatcgggccgccttccagccggacgcccgtaaaggcgttcattccggcccacgaagcctgtccgaagcaggagaaggtgtaatccttgccctttttgagtgcgatcgactgcaagcaggcatcgcaccagctgccgtcgttggggttttcaagcttcaaagcgacctgaccgccgtgtgtctgcgtgtgtttcgacaccagcgaaggctccttgtacgctccttcgaaataccagagtgaacggtagtcgattgcttcatcggggaaaagctcgaaaccgggctcggaaatcatattgaattcgtccgccgcgaacgtggctttcatcagggtgatgttcgaaagctgcgtcggatcgggattaagcttgatgtcgttgccgccctcctctttatcgtcggcacatccggcagcgaatgcggcggacagcaaaagtaacattgcgaaataacagtttttcatggtttttgttttttagttgtaggttattctgtttttacgggtttcaggcaaatatcgtccacggtgagcgtcatttcgggagcgccccaaactccgaaaaagacatcggcacttacagcctgaccggcattgaattcacaaccgaagcgtgtccattcgccggcttgggctgtgcccgttatgtcatggattgttccgtcggtcaatcggactccgacataggcaccctcaggaagcacctcttcggatttcacccagcactcgatcgagtaatcggcattctgctgcaaggataccgtctgagtgcatacgtcctgccactggccggaattcgtattcgagaaacggcaggcgatcttgccgctgtgcgcatcgcgcgaagtgagggccgccgcattcacatgccacatcgtcttgtagctcaacgcctgagtcgggtgctcctcgaaacctccttctgcaagcagattgatccccgcctgatcccagttgaggtcggcacgcatcaggaaaacgttccatgtaggcacggcatgagagatgacaaaccacaattcgtcgtcttcgttgaaccacgggtgaatatagggagcataaagcgcattgccatcctcatacatgatgatcttctcgcccgaccaatctccttcgggagagggtgcgtcccggtaaacgacggcccgctgattgactgacagatacatcatcatataccgtttgtaacggctgttgtatgcaacggtcatttcagacgccgttccccgtgcgactggctccgccgcctgttcgttgcgctcccagccgccgccggtccagtattcgtaggccgatttgtcgagaagcttcgtttcgctgacacgcgccagatagacgttgccgtaacgtcccgaatgtgtgccgtacatatatatcaacccgttttccttcagataggcgacctgcgtgaagttgctgtcggcattccatttgacgcccgaacgggtccatgctgtcccataattatccgagtaaacgatttcgctgtaattcaccgaccagtaatcgttatcacccgtaggagtccagtcatggatactcatgtagttcaggtactgacgggtgccgaccgcaatgccgcccgtaggaatgcaggtcacttcgtattccgaaccatcgggatattgcccggttttggcccgcgagacgacgatctcctttacggcattgccatccatcagcattcccgaataataaagcccgtccgtcaagtcacgatccgaagagagtgcgatggcgttcgatttccagttgccgcctccgtagtcgaaattatcgccgaatgcgcacatgaccgtcccgttgccggcatcccacatattgttgtaatcggtacggccgatattgaaccgggcgtccgttcggttgggattgggaatcgtttctccgctttccgaacgtccggtgacgcgcgccacgagcgttatgttatccggcagcagcgtccctgtttcgagaggttccggtcccggcggttccggatcgggaatctccgtatcggatgccgacgagcaacccggcagcagaaatatggcggcaatcaggaacaacatgcttctgatcccggatacgggccgcctgtctgttttaataagaatatccatcattttgacgaaggttaatgttggaaagcagttcggaagagggtatcggatacaattcgagatatttcttctgcttgggcgtgtggaatgtccagcttccgtttacatagagattccaccggatcagctgctcgcgccgcattccttcgcccgtgaactcgcgtccgagctctttcaggaattcgccgtaaggcacggatacgccgtcaacgactgtcaaggcggacaactgctcggccgtcagcttacgcacggatcggggcagagacggatcgaaactgcgtctgcgcacctcgttcacgatgtcagcggctccctgtgcatccccgtcacgaagcatacattcggctttcatcatcagggtctccccgaagcggaacacgacccagtcctgatcggtctcccatttctggccgattttgacctcgtactttccgaagcggtagccgtcgaattcacgggcggcgtcgatcgaggcgatttcgttgacataattgaagggtgtcacaccgtcagtaaaatagagcggctgcttggtgaggtagtcgtactgttgccccatgcagtaactctgcctgtaacgtttgtcattgtaatgatcgggatcggtggcatcgaacgtctcttttacgtacgaaggcacggcacgcagtccattgtaaccgcccgaacccgcgttgtagatcggtttgcaggcccagtgctgggttttggcatagatgcagtggaaaatcggcgatcccgtcgtttcatcatacggcaccgcaaaaatgatttcgggcgacgtttcgctttgcagactgaaaatattggaaaagctgtcgtcgagctggtatttcgcagacccgattatctcgttgcaaaggatgagcgtactgtcgcgcttggcggcatattcgctgccgagccacgattcggcattcagatatacctttgccagcagatgcttggctgcccacttgttaaaacgactgtaccgctgttcttcgggcagtttgtccatgctctcgcgcagttcccgcacgacgaaatcatacacctctttccggtcgcgcgtcgtcggcatataatctttcggcacgtcgtaggtctccatgatcggcacattcccgaaaagagacagcaggtaataataatagaatgcacgcacggcacgaacctccgccagcgtttgctcgtcgagctccagcccggcctcttcgaactgatgcagcacccggttgcagcaggtcgtaatgccataccacaagtggctccaacaagtactgaaatgggggtcggtcgatttccattcgtgattgtccagccgcagccagataccgccgtcataccagcctccgtccgaattggtcggaatgacccatgcatcggttccgagctcggtcaggtcccagatgctgcggtcctcgttgaaccagcgcatctgcccgtacatgggtgtcagcaggtaggccgagctctgttcactgtcctccagaatcttgtcgattgtcatatcgctgtaaatatccggatcgagattcgtgcatgaagccagcagaagtgcgcatgcgccgaacagatgtattgtttttcgtttcatggttttgatcattagaagttgaacgatgcaccgacgatgtacgaacgcaggttagggtatttgttgatcgggtccacgccgggtgtgaggccgacgatcgccacttcggggtccagcccagaatagccgctgatcgtaagcaggttcatgcccgtacagaagacccggatactgcgtatcaccttgttgcgttgtgaaagatcgaatgtgtagccgatggtcagattgtcgagtttgacgtaatcgcccggttcgatataacggtccgaatagatcgacggcgcgaaattgtaatattcgccgatcttctgataagctgatttcggcacgttgaaactcgacagccaagcgagtgtttcatacttcatccggtaggcgttcagaatatcgaagccgaaagctccgcgaaaggataccgacacgtcaagccccttccagcgataactggcctgcaaagcggcgaacattttgggcatcccgttaccgataatagtcttattatcttcactggggtccgaattttcggctccgacaacattccaagtcgtgctgtttttcagtccatcgacacgccatccgtagaagttgccgactgctcagccatcttcgagccggtgcgtgtaagtttgcatgggttctccggtcgagccgagtgtcagatattccattgtatacctgtcgttggagagcgaaatcagtttgtttttgttgtaggagaagtttccgctgagggtcaatgccatgtctttgcgggagatcaggtcgcctgaaagcatcacctcgacaccttggttgcgcatcgaacccacgttggccagaatcgaattggtaatattgggcggtgtcggaaccgtgtaggtgtagagcaggtcatcggtgcgccggttgtaaaaatcgatactgccccggaaccgactgttgaaaagagcgaaatccagtccgacgttaagttcctttttgcgctcccatttcagatcgtcgttggcattgttcgtcggcacgataccattcacccatttacctccgtcataccccatgtatgccgtactgaaattgtatagcgggacatattggtagggcgatgagggagcggtgccggttatgccgtatccgacccgtaatttgagatcggaaacccaatatgcatcccgcatgaacttttcctgtgtaatccgccagccggcacttacggccggaaaagtaccccaacggttgttctttccgaacttatcgcttccctcatggcgcaggctggccataaaaaggtatttattgtcgaaattatagttcactcggccgtagaaaccgatcagcttgatccggtacttatagctggtcagcttcgaggtgccatcgagcgtcgaattcgccgaaccgatattccatgcgccgaatccgtcaattgggaaatcgtaggcatacatttcggaagattggtggatatagtcattgtaactgtatccgacggttgcctgcagcgtatggcggccgaatttgcgcgaatagtcggcctgtaattcgagtgtcttgtcctcgccgtggcccccggagagtcgcgcctgtccctgcgtgctgcccatcgtcgatgaataatgcttttgggtcgtgctgtaagcgtaatcgttgaagtcgcccatgtagatacccgttgcactgatcgtcaggtccttgaccggttcgaccgaaatccgtcccgacatcatcagctggtcgtacttgttttcggtgttctgttctttcagtaagcctaccgggttggcaccgttgctgttttcataataggagccgtcggcgttgtagaccgggatggtcgggttccggctgagcgcctgcatatagagatcgtccggaacgataccctgcgttacgattttattgctgacattcagggcgatcttgaaccggtcgtcgaacattgcgtggttgatgctgagtttggcggtcaacgactcgtcgaaagagcccttgtagataccttgtttgtcgttgtaggttaccgaagcgaggtaattcgtccgggcatttccgccttgcagcgaaacatagtgcgtctgactgacgggcgtgcgggtaatctcccggacccagtccgtgtcgcccttgaaatcgttgatcaggtcgaagcgggaatcctctttcgcaagccgggatttcagactgcggagttccgtggcatccggatagtcggaggtctcatcgagcatttggtcgatggtgacatagcctttgtattccaacgcgactcgtcccgactgcggccgtttggtattgatgataatcacgccgttcgttccgcgcgtaccgtagatggcagcggccgaaccatccttcaagacatcgatggattcaatgtcttccggtgaaatggcgttgagggaccctccggccaccccgtcgatcacgataagcggagccgaagaggctgccagcgtcgaaataccgcgcaacatgatgctcagctcgccgctgggattgcccgatgttttggaaatacccagaccggcgacttttccctgaagcagttgaagcggattgctgacgcttccttgtaaaaattcatcggatgacactcgggtgattgaactggtgatctcctctttgcggatcgtgccgtaaccgatcgcaatcacttcctcaaggccgatggcatcggcttcgagtgcgaagttcacctctgtccggccatttacagcggcttctgcactcttcatgccgataaaggaacacacgagcgttgcatttccgtcctttacgttcagcgagtaactgccgtcgctgccggtcgaggtcccggtcgtagttcccttgacgatgaccgatgccccggcaattccgtttccggtctgatcggtcacttttccggaaatgccgtgactcgtttgagcagatgccggcatgccgtacagcagcatcagagccatgcataacatgaaatagagttgtttcataattgatggtatttaggttaatttttctccgttgccgcagacgctgccgtcccgtaccagaaagcagctgcccggtaatcgaccgcaccgggattccagctcagcatttccaagtcaaattgcaaccgttgcccgaaaggtattacatccagattgcgggttcggacaaaggtattgtatccgtgcgacgatgcttcatcggcccggggagcgccgccgaacggcgttgcgaacggcaccacaggcgcccaagaacagttgtaatagtcctctgtcccggtacccatgaacgacgggaacgtatcgttatcgatccatatcttttcatcgccctcaccataccagtccgggcagtggttgtaaagcgacaacacatcgccgcaatagaccccgcgaccggttatggtcgtaaaattccagtcgagattgtccggcgagttataatcattgttgactggaatacttgtttcatcgtggtaagttgcatggaaatagagtgtctgtgccgtccagtcgaaatcatcgacataacccgtgattacggctgtaaagggaatatcggtccttttttcgagacgcaggtccgcatgttccgcataaggcatcacccaacggctcgtaaaggtgcctttgccgtcggacgagacgtaccagttcgatgaagccggtgcaccggtgccggctccgaagaaacagtcgaggggacaccatacgcagcgtataccgtcgaaatcgatacgcagccaagtccgctgcatgatctcgacaagatctgccggatcaaattccgagagcgttatggtcaacgaccggatcgctttgtttccgtcgggcaagtgcagcgacgtggcgccgttcgacatcggggtgacggtccgggtacactccgttccgtcggtatacgtttcgggcgaaaacaatttacggtttaccgcggcgatcttatccgtgagcttgcgcacttctctcaacgagaaggtccgaacattcgttccgttgtcataggttctgtatccgacatgataataacgggggattttgaccgtgtaatcggactcttcgagtgtgatgcggcaggatcgggcataaggcaggggcagaaagaaggtgttgccaccggttttggagagttcatcttcataatgcgtatgtgtcaatgagagggcctcgcctacagtcaccgggaagcgtgccatatcataggctggaatctcgatttcaggcgtacttgctccgtcgaaatagaaccgcagcgttccccgtttatcgttggttgtcatccagatgcgcgttatggctccggggcccttttcatcgaagagcaccttttcgacacggccgcgaatcgtgtcgagccgttcgaatccggctccgtcgtcgttggcgaaccagccgggttcatgagggtcaacggtacggcggtcgtaactgctgacctgcgccgcacggtaattcacggccggataaccggtcactgcgtcgtatgaaatcatttcatccaacagtgacgccatcgtcacctgtgaagcggcgtccgagggactgccgtgcgttccgcagcctatggtgcagagcgccattaagatcgtagtcagtcgtttcatggtaaacttgggttttaaggtcagattattttcgaggcggaggccatgcgcctgcgcaggtacagacataagccgcggtttcaacggcagtccggtgcgcctctgcgatcgtccggcccgaaagcaaggctccgatcagggttccggagaaggcatcgccagcgcctacggtatcgacgacttccacccggggtgtcggcagcgtagatatacactcgcgggtataaatggagctgaaacgatccccgccggtaagtacgaccatgcgaagtgcatattgttccgccaattggcggcacgcagcatccgtatcctccggaagcgcaaacatctcctgcaaccggacgagttcgtcatcgtttattttcagcacgttcgcgatgcggagcgaccggtcgatcaactctttcgaatagaaatgctgacgcaggttgatatcatagatgcgataagcgtcggccggtacagtttcgaccatggcgcatgtggtccggtgcgaaacttcgccgcgctgtgccagcgtgccgaagcagatggcgccggctcggcgcgccaaagacagcatctcttccgtgagcggaatataatcccatgcgacatgttcgtggatcgtgtaggtaggctggccgtcgcagagcgacacatcgacagtgccggtcggcttatccaccgtagcaacgagtgtacggataccgtaactggcggtaactgccagcagatcgcgtccggcatcgtcattgccgacagcgctgacagcccagccttcgacaccgttctgcgaggcatgataggcaaaattcacgggagctcctccggctttgcggccagtaggcaaaatatcccacagaaattcgccgatgccgataacaaggggtttagaatacatcttactctttttttagcagttgtttttcaatctcttcaagcgaacgccctttggtttcgggaatccagatgtagataaacagccatgcagcaaggcaaaggactccgaatccggcaaaaacgattgccgcaccgaaactctccagcattatggggaagaactgcacgaccagaaatgcgcaggcccagctgatccccgttgaaagcgccatggccgtaccccggatcgccgagggatatatttcggctgtaacgacgaacataagcggggaaagcgacacagcaaagaaagcgatgtaaacaagcagggcgatcagaatcccgatactgccgggcagcggctgggcaaaggcataggtcaggtacgctagtgacacgaccaatccggcacatccccacaaaagcagtttcttgcggcccagacggtccactagccatacggcgacaatcgtgaacagaaagttcactattccgacataaatggcctgcataagtgccgtatctccgccgataccggtctgccgcaatatttcaggggcgtaattgatgataacgttaattccggtgatttgctggaatacggcgagcaacgagcccaacaggacgatgtgtgtcgtcgatccgcggaataactcggataatttgggcccgcccttctgcgaagatttcggtgtttcaagcataactgccgcatcttcggaagaaattcccatgcgggcgatggcttttcgggcaacctcatattccccctgtttaatcagccaacgcggactttcgggcagaaacaacagcatcagtagattgcccgcagcgaacaacaacggcaatcctagcatccaacgccagttgtttccccacgaaatcatcccaaaatcggcgcaataagcagcaagaatgccgataacgatgaataactggtaaaacgaaacgaatgttccgcgccatttggcaggagatatttcggatatataaataggtattacagccgagaggacacccataccgcagccgcctaggaaacgggctgcaatcagccatgcggcattgcttgccatggcacatccgacggccgacagtatcaacatgacggcagatatgatcatcatgtttctgcggccgtatttatcgctgtaacgccctcccagcaatgctcctatcaggcagccaatcataatggcgcttgtcacgagtcccatggccatggccgaaagcccgaactcggcggtaatgaattcgagcgccccggaaattcctcccaaattaagcccgactacgaatgccccgaacgaggcggcaaagacatacccgaatagtagtaacttgtttttcatatcagattagttgatttatttggtataacaaaaatagtctgttgtgtgtaacgtttcgataacgattgttacagatgtgataagccttgttacaaatcgatctaattcgatttgcgtgtttgtagtctggttacaaatccgcaatatggataagagcggtcgtattcatgcaaatctttgcgtagcgacacgacatgcaaatggtcccatctgacgatgggaaaaatccgcgccggagaatctttgagagaagttttgaaaatcctccgttacggtttccatagccgggtctgttcccggtgcaatattacaaccgtttcggggtgtcccgtcctgaaaaaggtttacagtgattgataattaaagataaacattttggttcaaaaaatattgtcctgatataagtttacatatgccttccgaacaaccgtctttcggccccaatgatgtttgagtttcccggttctaagttccgcttccaagggcgtaagccaatcgcagctggcatgaggtctgagtgaattgtaaaggataacgatctggtcgatgcgttcttttgctgcctgaaaactttcaaaacattcctcgtcgatccattcgctcttcagaataccgttcacccgttcggcaacggcattctcatacggatcgcccttttcagtcatgctgatgcgaatcccattatcggtcagtaatttcacatattctttcgaacaatattggcatcctctgtccgaatgatggattaacccttgccgtttttgctgcggagtctggtctatggccatcctcagtgcacggagcgctccgtcccgttccaatgtcgtattcagattatagcctacgatccgtttggaataggcatccgttatcaaagccagatatgcaaatccttctttcaaagaaatgtacgtaatatctccgacccataaacgatgcggccgctcgaggtcgaaaccccggatcagattcggatatttacgcatccagtgccgcgagcaggtcgtaacgctgtatttcttccgacgtttgaccagaagattgttttccgaaagcagcgtaaataaccgatcccgactgaccggaaatccgtcttgttgcagcaaatgccacagtttacgaccgccgagcctgggcatcagtttccggtagtaacccacccgctccaaaagaagggtgtcggacaaagatccttccctattacgccgtaaatgtttataataggcctgacgggtatagccgaacaacccgcacagaaacgacaggctcattgctgtgtgtctttctttgagacgctggactgtccggctgcggatttttttagcaggtcgataccgtattcttcttggaggatatctcccatgatctcatagccttccagacgtaataaagcctcttccaagcgccgccgaagggctttgttctcggataataattcactggcttcttcactcgtaacgcgggacatgatcggataaggattaggggtactcacaaagctacaactgtttttcgctttccaccgctgacccatcttatgaatcgtagacatgggaataccatgttcttcggagagttggcgagccgtcttgactccgctcaaatactcctgtaaaatcagatgacgcaactgacgcgataaataatgacgtgataagtctgaattcgttttttgctgcataagatttactcttttctgtaaacctttttcaggacgggacagatgaaaaaaagtccgccgaacggactggagcggtcgtgagcggacatcagaatcgaagcgattcggcaggttgtatattgccatcgaaacaaatattcagataaagaaacagacggttggacaaatatttatcggaataatcacccggacatgcggatgattcgatgcagaaacagagaaatatataattcaagaaataaatatctaaacaaatctgcatttatacggcagtttatcgaagcaggccgcgaaagaaatctctgttgcaactatttggtttctgatatgcgtgtgttgtgaagcggctgccgtccggtccgcagagtgtgcgacggtagaattctaagataaaaccaaataaaagctgcaaaaagtttcatgcccggaaattgtcattttttgtcgtagcgtttagcaaaatgattctggttatgggatgcaaggccgcgaagcgcttgtatagccttgcatcccatagtcagaatcgttaatttgcggagtacggaaatgacaatacattaattatgagtaggttcggctcccaattagacggactgttccgacaataagattttgagattttgaatgatctcaaaatcttatcgaatggcagatatgtatgccggattatatctgcaacgctacatatggtgttccacgccttacgacggcaaagcatctggcggcgattttggccctcacagcattcaggacgctgaatttatgtttaccttcagccactttgcgttcgtaatatgcctttagttgcggatcacacctgatggcaatcagtgcactgcggttcagttgtactttaatgtctcgattcgccatgctcgatgtgtggcatcccccgcgaacgcttgtgccggagctatgttcgaacggagccagcccgcaatagcaggcaaacttgcggtggtctgtgattttggtgaaattaagcgtcgaacagagcatcacaatggccgtgatcggccctacacctttgatgctggtcagcagcttgtagttccggcaaatgttgctgtcggcggctatcagttccttcatttcccgttcgatggttttcatatgagtttctgcatacgcgatctcctcctggagcatggaacgttgaatagatacatccgcgaatttctctttgtagtctaatttttcgagcaacaccagtttcgctacacgttgttttgccagatgagcccttaagatcagccatgtgcgcaactgacacagttccttctctgccggcagataaagggctatcttccgatagtgagtgatcgcatactcggcgatacgccgggcatccactctgtctgttttgccacgggcaatacccatcgaatacttgattaccaacggcgagatcagtgaaaaattgaaattcagcgtcctgtcggaagcacaaaccgccatctcggatatgtagctccccatatcctcggcgcagaaaatcacatcgtcgagccgaataccatgccgcttctcaacccagtgcagacacgagcagatcccttttcgggagttggcgaatttgcggtgagccatctcgtttgcatcctcgaaggcgaccaaagacgcatcgaaagtctctttcgacacatccagacccacataatacaaatagtgcataacttgttagttttgtgagagtcgtatgctatcacatgtaccaggtcttcaaacctacaattctaaacagccattctctctggttaatggagtcgcagtccaaatctaccgccaagcctcaaagcttacgacaagccccggttcactgcgactccatatcgaaattacctgtgattacatcacgctgcaaatctacatgcgaccagcaaaacgctggggatggaaatcccaaggctcgcccttcgagcgattcgcatggccttgcgtattttcatctccggtgtttaattccctgccggcggaaataaattacggggtacggtattccggaatcgtgccggattactgcgtgaccttgaagacgctgttgagtttttcgctcaacgccgccatatcctgcccgatcttgtcgttggtgatgcaggcatagatttgggacgtggttggcaaccggcattttgcctgtcgtttctatgcaggttgttcgggctatacccgtcaggcctattataaacatttatggcgtaatgtgcaagcagccttgtccgatacccttcttttgaagcggatgggttactaccgaaaactgatgccccggctcggcggctgcaaactgtgacatttgctgcaataagacggatttccggtcagccgggatcggttatttacgctgctttcggaaaacaatcttctagtcaaacgtcggaagaaatagcttacgacctgctcgcggcgctggatgcaaatattcgaatctgatccgaggtttcggcctcgaacggacgcatcgtttatgggccggagatattacgtatatttctttgaaagagggatttgcatatctggctctgataacggatgcctattggctatgatctgaatacgactttggaacgggacggagcgctctgtgctctgaggatggccatagaccacactccgtagcaaaaacggcaagggttaatccatcactcggacagaggatgccaatattgttcgaaagaatatgtgaaattgttgaccgataatgggattcgcatcaacatgactgaaaagggcgatctgtatgagaatgctgttgcagaacgggtgaacggtattctgaaaagcgaatggatcgacgaagaatgttttgaaagttttcaggcagcataagaacgcctcgatgagatcgttatcctttacaattcactcagacctcatgccagttgcgattggcttacgccctttgaagcggaacctagaaccgggaagttcaaacatcattggtgccgaaaaattcggaagtcatatgtaaacttatatcaggacaatattttttgaaccaaaatgctcatatttaattatcactgtaaaccttttcaggaccatcaggaaccgtttcattttcggaagccgtaacgaggaattctgaaacctttgggtaggaattttccggtgcggattttttgctcatttgaagcgagcgagtctggagccgctttcaaatcgcgttttttagatatataaataccaaccgcaaatcgacagtcggaaatgaccaaaatattgaaaaatgtggtttgtaaatattctttccggcttaatgaattccaatgaactgctctgcgaagccggattggagcatgacttcaactgtcttatcgttaaatgtattttcggcaagggggcgttgtcagacacgactcgtcgaagatgcggctttcttcgggagtgatgatttttcatacttcaaatggcagaagtctttgtgtgtagtgtgtgcttcatgtgtcctatatatagacatgatggatgaacctgctaattcaagacacaatgactcccgaacaaacgaagaaattcaagtactggcagacccgcacaatcgtcgtgacgatggtcggttatgcgctctattattttgtccgcaagaatttcaataccgccatgccgagcatcgaggttacattcggcataaccaaggcccaactggggctgtttctgaccttgaacggtattatttacggtctgtcccgctttattaacggattcatcgccgaccgtgtaagcgcccggaaggtcatgtctctgggacttgcgctcagtgcgctggtcaatatcggattcggattcagtgataaaatggcgatgctcgtcgccggaacggccggcgggcaggagtacattacggcgcttacgatcatcatgggttcgattttgctgttgaacggttattttcaaggcatgggagttccacccgtcccgcccctcatgactcactgggtgccggccaacgaactggcccgcaaaatgtcgatctggaacatgtcgcactcgatcggggccgggttgatctttgtaatgggcgccgtgctggtacactattttgacaacagcgcatggcggctttgttttctcattcctgcggcgttttcgcttttgggagcggtcgctttgtaccttgcactgcgcgacaaaccttcttcggtggggctgcccgaacttgagcagatgaaggttccgggcgaagagcagaaacctgtccggaaatcggacaaggcctatcatgcggccttcctgcgccgtatggtattcgggaatccgatcgtctgggtgctttcagtctccaatttttttgtttacatcgtccggttctcattgctcgactgggggatgatgcttctgcctcataccaaaggaatatcggtcgccgtagccggaatcatggtggcggcattcgaatttatcggcggaaatctgggtatggtgatcgcaggatgggcgactgaccggctgttcggcagccgcgcacaccgcacatgtgttttctgtatgcttgggacgatcgtcatgacgatcgtattttggtgcattcccgataccgtctctccgtgggtaatggccgttcctttcatgctgattgctttttttatctacggaccgcaggcgctgctcgggatcgccatgtcgaatcaggcgaccaaagaggcgtcggccactgccaacgggatactcggcgtattcggttatgccagtacgctgatctccggcgtcgggctggggtttatcgccgaccgttacgggtggaattccatctacgccgtaattcttgtcttcgccgttttggggttgctgacgttgacgactatctggaaagccgctcccgacggttacggtgcggcaaaaaaattcacagccgaatacgaaaggaattcgagtcgataattttttttatatttgtttgccttcacaccattatcccggaaaacagatgccgttggattccgaatacgaactgatgcaacgattgtccgcaggcaacgaggatgctttcggagagttgttcgggagatattatccccgtgtctgcgcgttcgtcggctgtatcgtcaaggaggagagcactgcggaagacattgcgcaggacatttttctgaagatttgggaacggcgcgacatctttcaggggcgggtcgcttcgttcaacggatatgtttatcgcatggcgcgtaacgccgctctcaatgcgattcgtcagatgaccaatattgattgggaacaatatattcagatcgaggaaacgctgccggacgaatcgttcgaaaaggaatactattcccgtgaaaaagagcttttcatccggcttgtcgtctgccggatgcccgaacaacgccgccggatattcgaaatgagccgttatgcggggatggacaatcaggccattgccgacgaactcaagatatcgaaacgaacggtcgaaaaccacctgacgctcgcattgaaaaaactacgcgaggcattagccgttttctcgcttcttttctttatgcactgatctcattcgccgggtaatcccgaaaaaaagtgtttgtcgttgtgtgtcgaaccgttccggtgtgtcttataaacagagacggggaccgggcttttccgcccctcccccggaaagcggcagggagcgcccgcttctctttccgcaggagaatttgaaacccaaacaatcgaaataccaccatgtcgagaatccgaaaaatcatcagtatttatctgagttatcgccagccccgcagtacgcgtaaagagtttgccgagtggttcgcagctccgttcgacggagagacgaaacaacggctgatgcgggagtactgggatgcgctgtctcccgaaatgtctcaggaccgggtgcagaaggcatatgcccgcgtacgggaacgcatcgggttccggagtgtctcgctgccgtcgccgcagggtgtccgtccggtgttcagaagagcggcagtcatggtggcaatgatagctattcccgttttggccgttgcgctctatgcgctgatcgggcatatgaactccgctcccaagtggcaggaaatctacgccccttacggtcagacccggagcgtggttctggccgacggttcgcagatcgtcatcaattccgggagcaggctgatctatcccgaccggttcgccggaaaggagcggcgggtgtttctctgcggagaagcttatgccgatatcgccaaaaatcccaagcgcagtttcgtgctctcggccgacgacgtcgatattctggtgcacggcacctcgttccgggtcagttcctatgtgaatgacagcgaagtggaagtcgccttgctttcgggtgcgatagacatgcaaaccaagaatctgcagcagaactgcaagatccagatgactccgggcgacatggtcaaggtcgacaaacggtcggggcgcgtcacgtcgatgcggttccccggcgggacgttcgccaacggcatagacgacggtcacctgacgttcatcaattcgcggctctcggatatagcccggcagctcgaacgcacgtttgacgtgaagatcgttatcgacagccagcagctggccgacgaacgctattattctgttttcataaatcacgaaacgctggacgagattctctccattctggaacagaacggcgatatgaaacaccgccgcgaaggggagatgatccacctttataagaaatgaccatccgaaaaacacaacctataaacctaaaacttcatctatgaaaaaaacatttacttttcacacccggagccggttatggattctttgcgccgcggtgtgcatggtatgggccgttccgctgcatgcccaaacgcggaggatcagtctgaacctgaagaacgcaacgattcagcaggcggtgatcgccctgcagcagcagggatattcactctcggtcaaggccgacgatgtggacatgaaggctccggtggacatccatgcccggaacgaagagctgcaggcggttgtggaccgtatttttgcagggcaggacgtgaactgcatcatcaacgataaaagtattctgattacgaaagtcccgtctcagccttcgtccgaagactcgccgcaggaatcatccgtaaccggacaggtgaaaggcccgaacggactgccgcttgtcggcgtcaccgtgctgatcgacggtacgatggtcgggacgacgaccgatgcctccggaaatttccggatcagggcgaagtccggggatacgctggtcttctcgtatatcggttacgacgagcgccgggaaaaggtaggagtccggacggagatcgacgtgacgctggccgaaagctcgacgctggtgaatgaagtggtggtgatcggttacggcacgcagtcgcgccgtacgctctcgacagccatctctaaagtcagcggcgaggtcttcgacaatgcaccggccgcgaccgtgggcgatgcgctgaaaggccgggttgcgggactgcacgtacagacgagcaacgccatagccggagagtctccccgcatgatgattcgcggcggatcgtccatcacgatgggcaatgatccgatctacatcgtggacggggctttgcgcgaggacctgaccggtatcaatacgaacgacattgagtcgatggaggtgctcaaggacgccgcctcggccagtatctacggcgctagggcatccaacggcgtaattctggtcacgaccaaaaaaggttcgttggcaaagggcccccagatcgtgttcgacctccagctgggctgttcgtctccttcgcgcaaatgggatttcatgaatgcccgcgaatacattagttttcttcgtcccgttatcagcaaagcctatgcgaacggcattgagcacaatgcgaagaccatgctttcgggtcccaatgcctacggtacgggaaacacggcgccgaatgccaactattcgacccgttatctcgattacgggcagccggtcccggcaggttatcaatggatgtacgatccgctggatgctaataaggtgattatcttcaccgataccgactggcagtcgcagtggttcaccgacgcattctggcacaaggagtacatcggtgtaaacgggggaaccgacaaactgaaatatgccgcgtcggtcagttatcacggcgacgacggcatggttgcgatgagcagctacaaggtcttcaccctgcacggcagcacgtcgttcaagattacgaagaatctggaggcgtcgactacgttcgacttgtcgcgccagaaaaagcatccgctcatcgacaactactatcaggccatcggccgaggcatcatagccgcacccacggcgcgcgaattcgacgacaacggcgactggtgtcagctgagctccaacggcaatgcccatagtgcgggatggtacgagtcgttctacgaccgcgagcaggccatcaaccgggcttcggggacgttcggactcaaatggaacatcaccgacggattgacggctttcgcgcagtacaactatttcgacaactcctaccggggaagttattatgcctacggagagcgcaacggcactcccaataacgtctcgctggagcgcaacaccaccgaaacccgcgaacaaaccatccgggacatctttacggctcatctcaattacaacaagacgttccgcgacgtgcatacgctgaacgttaccggcggttatgagtatatgtcccagaattactggaaggtgaaagccaatgcgaaaggggcttcgtcggacgatgtgcctgtgctcggctccggttcgatcttcacggcgagcaatcaggacgagaagcaggcgatgatctcctatttcgcgcgggcatcgtacaattatgacgaccgttacatcgtttcgggaacgtttcgtgccgacgggtcctccaaatttgctgtcggcaatcaatggggctatttcccggccggttcggtggcatgggtcatttcggaggaaccgttctggcgcaatgccaagaagacggccaacaccttcaagttgcgcgcctcctacggacagaccggtaacaacggcatcgggctttacgatgcatacggcgcattcgcgaccggcacgtaccacgggcacactacattgctgccgtccgccatggcgaattcggccctgaagtgggagactaccacgcagcttgatctcggtatggatttgggatttttcggcgaccggctgcggtttgtgttcgactactacaacaaacatacggacaatatgctgttttccatctccgtacccgatacgggaccctattcgtcggtcaaggcgaacgtgggcagcgcccggttctacggcgtggaagtcgagcttagttcggtgaatatccgcagggagcatttcagctggacgaccgacattacgtattcgtttacccgcaacaaggtgttgtcgctgcccggagaatatgcctatgacgagatcgatgcggacggccgtgcgacggggcggcgtgcataccgtatcggcggatacaaagcttccgagagcggttaccgcttcggcggtactgccgtgggcgaaccgctgggacgcatatacggctataagatcgaccacatcatccagacggaggccgaggctgatgcggctctttacgacgaacagtcgaacggttaccgcgtaggcgacggacgtatggtcaaggggcgcaaggatgccggcgactatgaatggcgcaaccgcaaaggttccgcgcgcagggacggcgaggagatcatcaacgacgaggaccaattctatctgggcaatgtcatgcctcactcgacgggaggtatcaacaatacgttccgctacaaacggctttcgttgaacgtctactgcgactttgcgctgggacattcgatcatcaacggcatgaaggcccatctgctgcgcaacaccatgggcaactgcaattcgacgatcggccgtatcgcgtacgactgctggcagcatcccggcgatacggatgccaagtacgcccgctttttccccaacgattccgactggggcaaccgcaactggcgccaatcgaatttcatggttgaaaaagccgactatttgtgtctgcgcgacgtttcgctctactacgacctgcccgaacactggctgcgcaaaatcggcatccggaaagtgacggtgggcgtaaccgggaatacgctttgttattggacgggagttacgggggccatcagccccgaaagcggtatcggatccaatgcgggtgcaggcatgtatacgcccgtgtcgaccagcaattccaactccgacatcaccgccaatatgatgccggttccgcgcaagatcatcttcagcctcaaactggttttctaacgtttcagaccttaaaacaaccaaccatgaactataaaaacataagatcgctcctgctcgtatggattgccgcgggagttgtctcctgtcacggcgatttggacatcatgcaggacaacaaactatccgtgagcaatatgtggaagacgtccattcaggtcgagaactccacttacggcatctactccgccatgcgggacaactttgttcaggatcaggtcaacgtcctgacttggggagagctgcgcgtgggcgagtacatgtggcggaacagccgcacggagacgatctggctcgcggacctgcggagcgtggtgcagaataccatgtcctccacgacgaacgccgtcagctggtcgaaactttatacggcgatcgatcaggccaatgccgtgctcaaatacgcgcctgcggtcgccatgaccgatacgaaacgaagctgggcgatcggacaggcgtcgttcgcccgcgcctatctctatttctgggccgtgcggttgtggggcgacgttcctttgaacctgaatcccatcgagtcggtcgcacagcccgaagcctatccgattcgtgcacccaaagcctcggtatacgcccagatcgggaccgacatcgaccgggctgtcgaaaatgcgggcagtctcggtacggataaatacttggcgaccgcggatgccgtcaacatgctcaaggccgaatacgcgctatggatgtatgcggtgcagaagggcggcgacgactatctgacaatggccgaagaggcgcttgctgccgtcggagtcaaggccggcgacaaccggctgctgactgattatgccaagatcttcgatggctacggttcgaacaataagaattcgaacgaggtagtattcgcgctctacaacagccgcgatgaaaacaagaccgggggattttcgacctacttcgccttctccgacggtgcgatcgatcccaatgcccaagcgaccgtgccgacgaatacgactgtgcaatatctggactatggcgacgagtaccttgaattgctgcacaaaagtcagacggaaaacaacgactcgcgtgtgaagaccaatctcggcgagggaccctacggaaaggaaaaccgggcggtggttacgtggccgaacaagttcatcggcaatgcggacagcagtccgatgattcgggattgcgacatcctctactatcgttatgcccttgccgtgatgctggatgccgagttgaaatattaccgcagggactatgcaggggcgctggcttcgctgaacatcatcgccaaacgggcgtacgggaaggagaacttccatacttccgccacgcaaggcgatgtcttgaaggcgttgtgcaacgaatacttgctggagtttccttgtgaaggcgttgtctggtgggcattgatccgcctcgatcggatttgggagtacaacgcggacctgaaggcgcgcaaggatgccgccaacatcctgttgtggcccatcagcaagagtgcccgcgacaaaaattcgaaccttgcccaaacggagggatggtattgatcgaaaacctaaaattacggaacatgagactgaatttcaagaaatatatggcggggctggcgactgcggcgacgctgcttctgacagcctgctacgaggatcatacagatttggaggaccggacgacgcggattcgcatcagtcctgaaatcgaagcgttcgaagcggacggaactgcgtccgtgtcgggcaacagcaatgtcacgtcggtggtgctggtcaaggtcggcacccgcgtatcccgcatggagtgggaggcggaactcgtcgactggatgccctcggtcgatgagaccgggccgtgggcgacgatccagcgtgtacccgtcgtttcgcagtatacggagattgccggaccgaataccgtcgccgtgacgcaatccggtttcgagttgactgcattgcccaatacgggatacggacgccggtgtacggtgcgcattacggccgaggacggtacggtgcaggattacgaactgttccagtacggcgagctggccgatgctgaggtggtgccggcgctcgaatcggtagagatatcttttcagggcgatcctgtcgatctggcttataccacgaatatgggcgacaagtatgcctatgcgatcgcttacgaggagggaggcgccgagggctggttgacggccgagcaccgcggtgaaggtttgctgacgctgaccgccgagccgtgggacgacatggaacgggatcgccgggcgacgctgacgatcaccgtgggcgacgacgaaacgagcaaagcggcggtggacattcccgtcgtgcagcttaggaaggcggaatactattatgtttacggctctgcgctgggcgaggaggctgctacggcgttgcagatgaagcgcgagtcggacgactcctatcgtgtcagcggattcttcttcgccacggaggacaatctgatctgcatcaacaaggattcacgggccggcgatccgagttggtatctcggtgccgacggcgagctgaagaactgggcccggaatgttacggcttcggatctgaagatcgaagcgaacggttatcgtacgctgacggtggatttcgctgcgggtacgtggaactggatacgtcagaacagtacgcccaattgcatgcccgacgaagaacttgcgaactatcctacgaaggattacccgacggcgtccggcggagtcaagacatggatgaccgtcagcctgcattggaacggcgggcccggcatcggagccgtcaagctcggttcgggactcgtcgggggctccaaaaccggcggatacggcaagcccagcgatacgaccgtgccctacgacgttcgcaatccggcttacgatacggccgaaaacggcggaggcatcgaggaacttcgggcgaatgacggaaccccgctggcttccaaatacggccggttgtattcctctttcgaggctgttacggggcagcccaacggtgcattgaacaaggcctatcagatcgcttcgccttacggcgagccgggtgccgtgctggtcgatgcgaccggaaccgccgtcacgatcgaaaacatccttatggcgacgctcgctgcggcggacgacgatgcgaaggccgaggccgagcatcccgtgttgaagatgcagatacaggggatttgtccctatggctggcatatcgccaaccttcaggactggaaagatctgatctgggccgcagcgcaggcttcgaagggttcgcggtacgaaatcgccgagtcgtcggccagctataaggccatcggcggaggttcgatcgccaatctgtctacgattctgttcgacgcttcatggaatacctattcctccggatcgcccatatcgccgctggcgcccgatttcgggttcaacatgttcattcagggatggcgcctctacgataccggatataattacggcgctacctccggcgatccccggttttatgcgtggattccgcttctggggcagtatacctccaagaaaacttcgttctggcgcatatacatcagcggacacaccaaaaccgacatgacgctgaacgacgggttcgatctgggcaacggttcgggcgctgcgatacgctgcgtgaagaattataaataaggaacaaatcaaaaaaagaatcatgatacgaaaaatcatatgcatgttgacattggccgccgccttcgtcggttgtacgaaggacgaatggcccgatcagcccgactggagcaggattcccgatccgagcattccggtcgacgacggattcatgaagccggcggcgtgttccaatacggtcgttgcccatcgcggaggagctgccgaatgcggtgcgccggacaactcgatggcggcgttggagtacgccatgagtctgggatgctacggcatggaatgcgacatttactggactaaggacaacgacatcatcgtggcgcatgccaacggcgactgcaaggtcaataacctgcagccgtggacggctaccgtggcagagttgcgcgctgcagggcggttgtcgaacggtgaggaactgcccacgctcgaagagtttatccgccgggtgatggtcgagggcaactgtacgcgtctggtgctcgacgtcaagcgtgtggacaaaccctatgcccagcccgaatatgtgatcaatgcggcgcgccgtgcgtgcgagatcgtcactgaaatgaaggcgaagcatttcgtcgaactgatctgcacgggattcaaccttgatgcgatgaaggctgcgcacaattgcgccgtaattgccgaagtgcctatcggcatgaactcgtcgcgttcagggaaggagtacggcacgctcggcttcgggtgggccaacctttcggcggcaagcggaatggatgcggcggcgggcggaaaggggtcctgctcgctcgaagagtacgagaaggcgggtgtggctctatcggtctacaatgttgaccagcgggcgggagacggcaatgccgtttattcgaccgctgctgtgaattattacattgcgaattacaaacgtttccgcacgttatgttcgaattatcccaagtggctgatcgggaagatcgaccatgcttacaaggtgtacgacggcattcgcagcgaggcggatttcgaggctttcgcggaatcgctcgccagcgatccgacagggcgccgttttctcgacggcaacggcgaggtggtgctccattgcgatctgacgctgaacgggttcgtgcctttgtctaatttttcgggcacgttcaacggaaacggtaagacgctcacgatcggttatcgcggcgacgcgcagcagatcggtctgttcaaacgtctcagcggcacggtacggaacctgaccgtcgccggacgcttcgaatcggtacgcagcgacgacagcgaaattcatctgggggcgttcgcggccgaaaccgacaatgcggcgatcgagaattgtacgaaccgggcggaaatcgttgtcgcagacgctgccgatgtcacgccgcgcaccatgatcctgagcggattcgtcggaaaggctttcaacggcgtgacgcttcgcaactgccggaacaccggaaatatctcgttttcatcgccggctctttatatgatcggaggctttgtcggagctgttcaggaagacgacgggctgtacacgatcgccgactgccacaacacggccgactttgacaatgcgggcagtaattcgggctggaatttcatgggcggcattgcgggcaaaacgatcagccggcagctcgttccgggcgagacgtcgaattaccggcttatcgtcgaagaatgctccagtacgggtacgatcagcattgccgggccgtcgaaagtgcgcgcttcgggtatcgtggcccaaacgcagggcgcttaccggatcagcggatgcacgttttccggagcgatcgagagtacggacgccaccaaacgcgacgtcgtgataggcggtatcatggccatggccgacaaggagtgtgtcgggctggtcgaaggatgcactttcagcggacggatttcggctgcgcaggccggtgccaacaacttcttcggcggcatatacggtaacaacggaggtgccgcgagcgttgtgaacgattgccggaccacggcttctgcctatgtcggctgtcccatcggcaaatcggtggggatgcttgccgggcgtcccaacaagaagggctttacggtcagcaattgccggatcgccggaaccgtaacgaacaaacagggcgcggcagtggtgatcacggccgataaccttgaagattggatgtttgccggatatggtacctccgtggcggtgactctgaaaaacaacggttacaacgacggaaaatagcacggaaagatactaactctaaattattcgaaaaatgaaaaaactattgttgacgggcatcgcgctcgtcggagcggcgctcgtgtttgcacaaccccggctggtcgcgcaccgcggcttttacacgacgccgggatcagacgaaaatacgatatcgagtctgatcaatgcgcagcagctgggcgtatacggcgtggaattcgatgtcaaccggacctctgacggggagttgatagtcgtccacggtcccaaagtcggcgatcggctcgacgcgcaaagggacacgtatgcggagatcagccgggtcgtattgccgggcggcaatcggatacctacgctccgcgaatttctggagcagggtcggaaggaccccggaacgaagttgattctggaattgaagaaacacaagacgcctgagatcgaaacccggatcgtcgaagagatcgtgtcgctctgtaagaaactgaacatgctggaccaaatggagttcacgtccttcagcgagcacgcctgcagggagtttcggcgcttggctccgcagaacaaaacactgtatatttccaattcgctttggacgcccatcaatgccgatgtcgctaagaaggagggttttcaactctcttacagcatgtatgtgtttatgaaccggcccgaactgatcgaccgcatgaatgaaatcggcgtagaatcgacactctggatcgtagacaatccggaggttgtggactgggccgtcaaacataatgtgggttttatttcgagtaattttcccgaccggatcaaagcgtatctcgatgcgctccggacagtggaaactgcccgtaatggcgcctgcaatctgatcagataagacacaatctcttaactcaaatttatcatgaaaaaagtaatcgcaattatcggttccggcatgatggggtccgctctggcgtttcccgccgccgaaaacggtcatgaagtgcgtttggtaggcacgcacctcgaccgtgacatcatcgacgaatgccgccgcagcaataagcatcccaaattcgacagagcgttccccgtcggagtaaaatattatcagatagaggaatacagagaggcagtcgccggagccgatttcgttatcggcggtgtttcgtcgttcggtgtggattggttcctgaacgagatactggtaaatcttgatccccggttgccggtgttgtctgtcaccaaagggcttatcaatctcgaagacggaacgttgatttcctatcccgattattggcggtcggagctgaagaaaaggggcgtcgaccgagaggtctgcgcggtcggcggcccctgcacctcttatgaactggtattccacgaccagaccgaggtagctttctgcggcagggataccgcttccctccgactgttcaaagagacgctttcgacctcttactatcacatttcgctgacccatgacgtgatcggtcttgagagcgccgtagcgttgaaaaacgcgtatgcgctggccgtcgccatgaccatcggtttggtcaaccgccatcatggcgcggatgccgggttgcattacaactcgcaggccggagcattctatcaggcggtcaaggagatgcgccggctgcttaagatacagcaggcgaccgaagactgcgagaacatcggtatcggagatctttacgtgacggtttacggcggtcggacccgcagaatcggtattctgctcggtgaagggaagtgttattccgaagcgatggatattctggccggtgtgaccctcgaatcgctggtcgtggcgcgccgggttgcaaaggcgatttaccgcaaggcggaattgggtcaggtctccctgcaggaattcccgatgctggtacatgccaacgacgtcctcgacaacgggaaggatgccgaacttccgtgggagaagtttacgttcgatcatacggcaaactgaacggagcggttacagcaatgaaaacagcaattaaagcggccgcagccgccggcctgttcatcctgaccctgtttccgggatgcgcgcagcggcaaacggatgaagcgaatctgcgcttgctctattggaatatccagaacggcatgtggtcggggcagggtgacaactatacgcgttttgtcaattgggtgagcgcccagaaccccgacgtctgtgtgtggtgtgaatcggtaaccaactacaaaacggcttcagatgagaagataaaacccgaagaggcctatctgccggaacattggggcgaactggcccggcgctacggacatgaatattggtataagggcggacaccgcgacaatttcccgcaggtcattacgtcgaaatacccgatcgagaacgtggctcgtctgatcggagccgttcccgacagcattgtttctcacggtgcgggatgggcgcagattcggaaaaacggtcatacggtcaatatcgtttcgctgcatacatggccgcaggtctacggtttcggtctggccgacaagctggaacgcaaggccagcgccgcggcgcgcgagggcgacaggtttcgccggatggagatcgaatacgtgtgcaaccatacgatcggatcggttgccggcgcggaaaagcaactatggatgatgatgggggatttcaactccaaatcgcgtgtcgataattacgagtacggatttccggaggatacgaccgcctttttggtccatgattacatatgtcagcacacgccgtatgtggatgtgatcgcagcgaaataccccggcgaattccagacgacgaccggccggcgtttccggatagattatgtttactgcacccgtccgctttacgatcggatcgtcagtgcgcgggtcgtaagcgacgagtacactacgcctgtccgagatccgcaggaattgcgcaatttctggcatccttcggatcaccgcccgatcatcatagatttcgatatgcgttgatgcggattccgatgactaaagactttgcaatatgtcgatgaccaattccaaactaacgcgtgtagcggacaatatccgcattttgtcggccgccatggtcgagaaggcgaaatcgggacaccccggcggctccatgggcggcgccgacttcatgacggtgctctataccgaatttctgcgctacgatccggacaatacgtcttacccctaccgtgatcgtttcttcctcgatccgggtcacatgtctccgatgctctattctacgctttctctggccgggtactatacgaccgaagaccttcagtctctgcgtcagtggggcagcgtgacgccgggtcacccggaagcagacttcgcacgcggtgtcgagaacacttccggccctctcggacagggtcatgccatggcgctgggcgccgccatcgcggaacggttcttggctgcccgcttcggcgagtggatggcgcacaagacctacgcctacatctcggacggcgccgtggaggaggagatttcgcagggcgtgggccgtatcgccggccatctgggtctgagcaacttcatcatgtactacgactcgaacaacatccagctttctacgaaggtggatgaagttatgaccgagaacgtggccatgaagtacgaggcgtgggggtggaacgtgctgtcagtggacggacataacatcaacgaaatccgcgaggcgctcgttgccgcgaactccgagacggagcgtcctacgctcatcatcggccgcacggtcatgggcaagggcgccaaaggccccgccggcgagagcttcgaggacaaggtttcgacccacgggcagccgctcacggcggccggtgccgacttcgccgctacggtgaagaatctgggcggggatccgaacgatccgttcgccgttttctccgagagtcgcgaagccttctccgagcgccgcgaagcgcttcgcgcatgggccgcacgtcaagccgaggtcgagaagacgtggcgcgccgaacacggcgatctcgcccgcaaactggatatgttcctttcggggcgcctgcccgaaatcgactacaagtcgatcgaggtgaaggccggcgtggcgacgcgcgcggcatcggctgccgtgctgggcgtcttcgccgaaaagatcgagaacatgatcgtggcttctgcggacctttcgaactcggacaaaacggacggctttctcaagaagaccaaggccttcacgaagggcgacttcagcggcaaattctttcaggctggagtctcggaactgacgatggcctgcgtggccaacggcatggcgctgcacgggggtgtgattcctgcgtgcggcacgttcttcgtcttctcggactacatgaaaccggcagtgcgtctttcggcgctgatgcgcctgcacgtgatctatatctggacgcacgactcgttccgcgttggtgaggacggtcctacgcaccagccgatcgagcatgaagcccagatccgcctgatggaacacctccgaaaccaccacgacgaacgttcgatggtcgtgctgcgcccggccgacggcgatgaaaccgtcatggcgtggaagctggccgtcgaggagcagcggcccgttgcgctggtgctgtcgcgtcagaacatcaagagccttccggcgctgggcgccagccgccgcgaggaggccgcacaggtcgccaagggcggttatgtggtgcttgactcggccaagcccgaagttgtgatggtcgccaccggctcggaggtctcgacgctcgttgagggcgccgaactgcttgccgccgagggtatcgccgtacgtgtggtgaacgtaccgagcgagggtcttttccgcgaccagccccgttcgtatcaggagagcgtgcttccggtgggcgtggtgcgctacggcctgacgtcgggacttccggtgaacctgatgggtcttgtgggcgagaaaggtatgatccacggtctggatcacttcggctattcggctccctatacggttctcgacgagaaattcggttacaacggcaagaccgtagccgaagaggttaagaagctgctcggaaagtagtcgggacgtttggactcttcggcaacggattcttccggccgaagaggtcaagaaattgctcggaaagtagtcgggacgttcttgcttttcggcaacggatattaacttgtcgaatggaatagttgatggctgtttgtttttcaatatatcctgaagatctgccgaaaggttataagttgtacctaatcgcaattagtggagccgcgtatcgcgtaagtgatacgcggcttttgttaatttagaaatcgtatagacgagcaaatgtttttaacacacatgaaacttctgaatatggagcaagagatcaaaaaaaatctacaactttagatatttggataaaccttatacttcattagataataatcagaatcaatttgcagcaataaacttacactcagatagacaaattgttacatgcgtctttatgtcgggtcatcttaaataaccgaatcgcaatgtttccgcatgcaaacctgcttttacgaatttgcgcgccatattacagtcctttgtgttaatacgattgtatgtcggtattgcataagttaaattatacgtaaattcaattacaatccttcttatttcgagtttctgaattttctgtatcggctgcgggcgattcgctcggcttactgcgcgaccttgaagatactgtcgagtttctcgctcaacgccgccatatcccggccgatcttgtcattggtgatttgggcgtagatttgggtcgtggtgatccgtttatgtcccagcattttgctgaccgtttccaaaggtacgccctgtgcaagcgtaaccgtcgtggcaaaggtatgccgggccatgtaagtaatatttagaaatgcaataaaaaacagaatgacgataattaaacgtaaaacgtttataattaagcattttgcaagatttgcagaacagacagacctgcaaaagaaaacaaaatattgcgacgtttcagttaccagactgttagccgcctgtttcgaaaacaacggcaggtaaccgaatttttaccgataggaacaaagcagatttgtattcactgtttatcaatgttttgcatgccaaaggacgcttttcaaaggagtatttctacaacctaaaaaagagcgttatgaaagtggaaaaattcaaggtgctgctctacctgaaaaagagcgagccggacaagaccggcaaggccccgatcatgggacggatcaccctcaaccgcacgatggcgcagttcagctgcaagctctcctgcacccccgggctgtggaacgcgcgtgagagccggctgaacggcaagagccgggaagcggtggagaccaatgaaaaaatagaaagactgctgcttgccgtacactcggccttcaattccctcatggaaagaaaaagggatttcgatgccgccgcggtcagggacatgttccagggcaatgcgggcatgcagatgaccctgctcaaacttctcgaccggcataacggggaaatgaaggcccgtgtcggtgtggaccgtgcgcccaccacactctcgacctacctcttcacctaccgcacgctttccgaattcatcaaggcgaaattcaaggttccggaccttgtcttcgggcagctcaacgagcagttcatccgcgactatcaggatttcatccttctggaaaagggatatgccgtggacacgcttcgcggctacctggccatcttgaaaaagatctgccgcatcgcctacaaggagggctactcggagaaataccatttctgccacttcaagctgcccaagcagaaggagacaacaccgaaagcactcagccgtgagaatttcgagaagctgcgtgatctggagataccggaaaaacgcaggtcacatgtcatcacccgggacctcttcctcttcgcctgttacaccggcaccgcctatgccgatgcggtaagcatcacccggaagaacctcttccgggatgacgagggcagcctctggctgaaataccggcgaaagaaaaccgactacctcggacgtgtcaagctgcttccggaagccgtcgcgttgattgagaaataccgggacgacacccgcgagactcttttcccgccgcaggactaccacacgctcagggccaatatgaaatccctgcgcctgatggcagggctgagccaggaccttgtctaccacatgggacggcattctttcgcctcgctggtcacgctcgaggagggagtgccgatagagaccatctgcaaaatgctgggacactccaacataaagaccacccagatatacgcgcgcgtaaccccgaagaagctgttcgaggacatggacaggttcgtcgaggcaacccgcgatttgaaacttatcctttaatccctaaacaatcattatcatgcgcagtacattcaagctcttattctacatcaaccgtaacaaggtgaaatcggacggcacgaccgccgtcctctgccggatcagcatcgacggaaagaaatcggcagtcacgacaggcgtctattgcaaacccggggactgggacagcaagaagtgtgaaatcaaaacagccagggagaacaaccgccttgccgccttccgcagccggttggaagaggcgtacgggaacctgctgaggaaccagggagtggtcacggtcgaactgctcaagaccaccgtgtcaggcgccaattccgtaccggaatacctcctgcaggccggagaggtggaacgcgaacggctcagggtccgctccaaggagatcaactccacttccacctaccgccagtcgaagaccacccagctcaacctcaggcagttcatcgaatcccgcgggatgaaggacatcgccttttcggacatcaccgaggagttcgccgaatcgttcaaggtctttctcaagaaggagctgggacacaggaacggacacgtgaaccactgcctgtgctggctcaaccggctcatctacatcgccgtggaccgggaaatactaagagccaatccgatagaggacgtggcatacgagaggaaagaaacacctaaactaaggcatatcagccgcagtgaactgaagcggatgatggaaaccccgctgcccgacccgatgatggagctggcacgcaggacgttcatcttctcctcgctgaccggtctggcctacgcggatacgagggctctccatccccgtcacatcggaacgacttcggaaggaagaaggtatatccgcatccgccgcgccaaaacggacgtggaggcgttcatcccgctgcatcccatagccggacagatactggagctttacaacaccacggatgacgacaggccggtattcccgctgccggtccgcgatgtcctctggtacgaggtacatggaatgggtgtggcattaggcatgaaagagaacctgtcctaccacatggcccggcattcgttcgggaccctgacactgaccgcgggcattccgatagagagcatcgccaggatgatgggccatacgaatatcgacagcacgcaggtctacgcccaggtcaccgaccggaagatatcctcggacatggaccggctgatggaaagaagaaagcctgcggccggcaaggaagccgcaggctaaataaaaattgccgtcggaatcgtaaatgcaattccggcggcaatccttaaacttgaatacgatattataccaatgcagcgtgatagttctcctccagcagcttctcgatgtccgattgcctgtacaggatcttcccgccaagctggatatagggaatccgtccttggtccctgtaatcctgcaggcacctgcggctgatcttcaacgtcccggaaagctccctgtcggtcaggaaccgttccccgttgaagggaggacggttgtcacgggcaagacgttccacttttttctccatgttgtccagcagggcaaagaacctgcgggcacgttcgttctccttgtcgataatgccttccatctcttccgctctttaaaggtttccgttctttcttccctctctcacagccttctccttgcgtctgatgccgacgtaggtcatcagcctctccacgtcttcgggcttgtaatagaacttgcgctggaggcgggtgaacgccagccgtccggtatcgcggagggtctgcagggtacgcggcgagatgtcaaggcgcaggcagacatcctggccgtccagtcactctccgggttccttacggcggtttctctcatacaatctgtccacatgtgcggacaggttctcggcgcgtgccagcatcctctcaaggacaccggcctcgatgtagcatatttccataatttcaacttgtttaaatgtcagtgcgaatataagggaagaaaccatgagaggcaagcgcgaccggtacactggcaggaatagtcatggatagtcggtttttgtcatatggcgcgggaaaaatactccgtagccggtcggttttcacgaccccctttggaaaacctgaaggacgggtgcgtcacggcgatgaaaaaagaaaaatccccaccggaagtgaagcgaccccaaaccggcagggagtgtaataataaaggaacggactgttcagcccttgatgtaaccgtactttttcaggtcgtccatgaaatgctccggcgtgtcggtcctcaccgtcaccccgtgcagttccctgtaccgcccggagaaattcaccatgtactccccgtcggtgcacccgctgtcaaaccagctgccctcacgcaggacgcgtacaaactcggaagggccggaggcggcaatcctgccgccatccgccaaaatacctgatctcgttttttttattatcggtatttcaaatgtctcaaaagcctctttgacaggttaccatccgggatgatcgcctgaattcgcatgtaccggattttctatttaccagattccataatggttcctgccatccgttttttctctgcggctgtcgcttttttcctcgtggcatcatggtctgttaccggatgggaaaagccatctccatcacaaccatgaattatagtgtagccatatttgtatatagccgtatgatacgctatccggataatgctatcacagaattgcgatatagccggatatcaaaatagggatagccgggagcgaagggagcacgcatccttccggatatagatatctcaaaatctccatttgcagaagtgtataaatatcaatccattaatggagattataaagaaaaaacataagtcacacacgactacctgtcattctccatttgcggatgtgtagaagtagcaatccattaatggagacgatgaagaaaaacaataaggcgtatacggctacctgttattctccatttacagatgtgtagaagtatcaatccattaatggagacgatgaaaaaacaataaggcgtatacggttacctgttattctccatttgcagaagtgtagaagtagcaatccgttaatggagacgatgaagaaaaacaataaggcgtatacggctacctgttattctccatttgcagaagtgtagaagtagcaatccgttaatggagacgatgaaaaaacaataaggcgtatacggctacatgtcattctccatttgcagaagtgtagaagtagcaatccgttaatggagacaatgaagaaaaaacataagtcgtacacggctacatgcccattctccatttgcagaagtgtagaagtagcaatccattaatggacaatagggcatgtaaagggcagattttccgtatattcgcctccttatccccgaattatgggcgtaagtcacatggtcatggagatatatctatcctttaatggggagagcagccggcaaatgcctgatggaaatgacccgaaaatcacaggagaataaccgtacaataggctgatacacaattcctattggagaatgttgtccccattaggggacagcaagttgtgttttcgtttaacgaaaacaggacggtttaacggagaatacaccgataaaccgttacttatttcaagctccagcgtcgctttttacatatctaactataattcatttgaaatcacaaaacagattgaaccgaatgtggttagtttgtctgtttatttcatgtccgaatcattagtatgctatgttgcaaagttcgtattcattatgaaaaaatccgcttacgagaacaagatattcaggtaatttgccatcctttccccaaagaagttcgatgttaaaaagttcagaaagcgttttggctatgtcaaatccgaaggcttcgagtgacggacgcactttttccgggtgtcggcatggtgtgccgcagttacgcgtacactcgttatctgagcagtgaagacatttacctatataggcaaatgaacgccctccatatttccgttccatatccaataattcgctctcgattcgtatccgttccggtaaaatgagtttttgtgtatattcaatcggaatatctttgtcttcagggattatcttcgttgccataagatgtgcatacttgtattgtcggagaaacgattccgtatcaaaatcaaatggaggacacccccaacttttaccgtaattggtacattgtttgcaaagttcaagaaaatgtggttcgtcacggaattcggcgatatatccttcaacagtgatgtctgaagtaaaattttctacagtgtatatactcattgtttcaaaatcattgtaccgcataaggagtcgaaacggatgttttcattttggaaaagtctgtcaatgtatccgcttttctgcatttcagacgcggtcaagcaacttaaattcggggtatctaacaatgctatcgaatcgcacatggacaacgcgatgtcaagttcatgtgtcgagaacatgatacattttttctcgtcgtggacaagcctacgaagcaacgccacaagttcgtagcgattaggcatgtcaagaaaggaagtcggttcatcaaggagaatgataggagtatcctgtgccaatgcacgagcaatcatcacacgctggcattcgccatccgacattttatccatcgtgcggtttgcataagcctccattcccaccgaaatgagcgattgcatgactatctccttatctgtttcttgcatcctacctatccagttggtataaggagcacggcctatggctacgacatccttgcaccgcaggttggcgatgcgcgtgcgctcggtcgtgacgacagccagcgtttttgccatatcttcggttttcatgcaggcgatgtcgtgcccgtcgagaatgatttttccggaataacaccggttcagaccggctatggcgcggagcaacgtcgattttcctgtcccgtttcttccgataagggctgtcagttgacctttttttatcgtggcatttacctcgtggagcaacgagttttctttgtaacctatggaaaaatgctgtaattctatcatgcggtgatggatttgttgcgtaaaaccacccatacgacgattgggattcccaatagagctgtaatggcgttgatcggcaaggtgaatattttagaaatgatgtcgcaaagaagcaatatcgatgctcccgaaagaattgttccgggcagaaggacatgatgatcgctattttggaaaagcattcttgtgacatgaggcatagcgagacctatgaaacctatcggaccgcaaaaagcggttatcgttccggcgagcagcgttgtcgagagaaacaacaggctgcgtgaacgccgaatattcagtcccattgttacggcatattcctctccgaacagcaggaggttaagcggtttgatggtcagtaccgccaacagcagtccggcaaacaccgatggaacaagaatcagaagttgtccggaggtgacgtcacccaaagcccccatcgtccaaatgacaaaggctttcagcgattcctctttgctgaggtactgcaatatctgcacgacagcacctacgcccgatgagaacatcatgcccagaatcaggattaccatgatgtcttttattcgctgtccgacggcagttatcacgagcaacacgacagccgcacccacccacgctgctccggcaatgcctattgatgaaccgatcccggcaagtaccacaagtgccacaccgagacttgcaccggaactgatgccaaggacatagggaccggcaagaggattacggaagagggtctgcatctgaagaccgctgaccgataaggcagccccggccaacagtgccactatagcttttatgaggcgtatgttgagtacgattttttccgtggcacgggaacaatttcccccggtcagtgctgcccatacatcgcggatcggaatgttgacagctcccacggccaagtccagtaaaaaaagaccgaccgtgagcgtaatcaatatggagaataatatagtcgaacgggaacgtatctatttcagttgcttgtaatacacacactcttcctgcaccagttcaggatggaatatcttcacgaggtcgcggagcacgatgtcaggattcacgacggcagactcgtaatagtcgttacccccggctgtgttggtacgggcgttgttgttatacacctctccatttttgaaacatcgggtatcggtgaatttcggacatgatgccttcaagtcgtcaagggagttcgccattcccacgttcagccacatgtccgcatccgacgcgagcagatatgcttcttctaagtcaatggggatagaagcgtttcccgtgttcttctggtagatatagcggcctcccgcatcagtaatcaagcgggctacataactttgggttgaaggcatgaaccacgagtcgccatagggaacattaagcataaccgaaggagtgccgagggtactgtcggccactttctttttcaaggcgttgtatctgaccgggattgcggcaaaggctttttcacccttctcacgttttcctgtgacttctgaaagcactaccatccattcggccttgccgagaggcgactcttcaagataatcgccgacatacatgaacggtatgtcgagttcttcgagtttgctttccattgcgcttgcgccgttcaccccatagagcagaacgaggtcgggatcgagcgagagcagcaactcgtagttgatgttcccttcatagccgacatcgccaatactgtcgcggcgggcttggatgtctgggttggaaatgtagtcgattcccgaaacgccggttatacaccggacttcaccgattgcgtcaagcatggcgatatgagtggaagacatcgccacgatgcgtttggcgtctcctttgagtacctgtcctgcaaacccttcgggaacctcttcaccgttgcggacgataaacagccatgtggttacactgtccgctccctgccagggattcctgacggttatcagtacgctttccttcccgcccgcccctttgatgtcgaagccggaggcatattcgggagcataaagcagcaggttgaaatcattgatttttgagcttttgttgtggcagcctgtaaatgccagagaaagcaacaaaatcaggcttaaattctttaatgcgttcatattgatgcagattatcgtttactatttttgttttttccgaacttgggtgttatgccgatgaatatctcgaaattgatgcccggcatgggacgggacaatacggaaaggtattcttcatcgaacaggttgttgatgctgccctttagcgacagatcggcccatcggaaagagagctgtttttccagtgtcacgttattcatgaagtaagggggcagatagcccgtcagagtatagtcattactcgacatggtataacgctggctgtaataacaccatttgtaaagcaggctccatgtccgccatgacagacgtccggtcaccgttgcggaaaactccggcacgtatggcaactgtttgccgacggattggtctgccggactcatcggttcgctctcgttgatcgaggaagtccacgagaaagttccgttcatatccagtttccagtcctttccgagcattatatcaaggtgggcgttggtctctgccccgtaagcatgtacctttttgaggtttctgggggagaagaatcccttggttgtgggtagccagatgatccagtcgtcgatgtgcgaatcgaaccagttgataccaccgctcaaagcatatacattttctttccccaccgagaacgacaaccccacgtcgtatgtgaagccgtgctcgcttttcaggtcgggattaccgcccggcagaaaatagaggtcgttcagcgtgggaaaacggtagttccgggagatggatgctttcgccacgatattgccttttttcgacagtaccccgtcgatgaagaaagccgggataaccggggcccattccgtaccgaacatatcctcgcgaaggacaagcgaggcggcaaaacgatcgacaggccgccatttcgcagaaacggaaccggaaaactcgacacgtcccttgtcatacccgacaacagccttgttaccttcctgcgagatgatatttttgtccgcgctttccaccaaatgctggtgtacggaaacaccggccgtgaacagccatttctctgaaggagcataatccccgtccgcacttccgtagaacgtgttaatcttactgcgtgagcgggtcatcgaagccatttcgccgtttcccttgtcccgcttgtaatcataggccatccatgtgtgtatatagccgccttttacaccgaccttccatttctcccgcacgcgatcccacgagaggacgccgcgaaacgtctgctccctttggcggttctcgaagtccatgtcgttcccgtaatccgtgctgagcatcgccagttcccggttagaattgatataccaggcgtttagcccgaacttgtcgccttcgcccgtgttataataaatttcctgcaagacgtgcagatccttataagccccgctgcggttgcgttccgtcgggtaataggaaccgatgatgttcttgtcctcgtcatagatgttttccttcttgtcccggtttcggtatttgtagtcgttgggggaagaggaatacaccacacgggtggaggactgccagtgtttgtcaccgtaggtcaggcggagaaactcgtcgaacgtgctgaacgaccccactccctgcacgtactgcaacccgaacccttcatggttggccggagaagtggagagcctgaccagaccacccaagccgccgcccgtttcgtttaccgatgacgttccgtgcagcagcgaggcatcatcgataaagtaagaagggatggtggaaaaatccgtcatgcccagcatcgggttgttaatgcgcataccattccacgtcacttgggtatgcgagggagaggtaccccggaaagccacggtggataacgtggcgcgtccgtagttcttgacaaaaacggatgagttgaatgtcagcacatcggccatagacaaggcgatgttctctttcatggcgatggaatcgaaacgggttcgttgcacgcctatatccttcataggtcgtttgcccaccaccgtaacctccggaatacgtagtacccttttggtaatgctgacggaatttttctgctgggcggcaagcagaaagggcaggcttacccccacgaacaatagaataagatgtcttttcatttttgtcctccttcctcgttatttccagcagaaagctcccggaatgattcccacgtaaaattcatcgatcagcttgccttgcggcgaatagcgatacacgataccttgttgctggtaatcaatagcgtcggccacatatacctccccgttgttgggattgaccgtaaggccgtagtatttggtgtcccgaaactccagaaaaggccggacgggaacacggtcggcttccaccggcattcgccaaatatcgttgttgatccagtaaagtgtatcccgtgtaccgttgagctggacttccgaaggccagtcgcccagcttaaacttgaactgtttctctacggtgaaagtctcggcgtctatacgatagagagacggtgcctcgtaaccgtatgggctgccctcgtaaccgccatccgtgatggtccacatcttgttgtatttgtccatgaccagcgaagtaggttgtatgccgatggtcagttcgtccacgaccttgtccgtctccgtgtcgattttcaggatgcggttctggtacgaccagcagttcacatagacgtacttgccgtattgtaccatttgttcggtggaacccgattccatgtccatgtctggacattcgatatagccggtaatctcgtatgtcttggggttgatgatgaagatacggtagtcccatatctgcgtcacataggctttctcatccgacagaaaatggatataccggggtgaggtgaaacctgtgatacggcccacttccttgaaagtattgatgtcgatggcgaaaatcacatgcgagttgttcaccacgatccagcctataccgtcccggataaccatagactgggccacatcgcccaacttgaacccgttggcacggtaaaacacttcattctccacttcgcacgtggcgggatcgtagtaggaaagcgtggcattgctgtactggaaattcccctcgttggtaatgaaaagaccagaggccgatacagagaaatcttccatctctccgtaatcccatttcatgcaactgccgaaaactggcaggcagaaaagaaaaaggcaaatccgttgtattgttctgctcattgtcattcggataaaaaagagtacccgaatcattacgggtactctggttaaggtataaggtttaatcctgctgcgtatattgtttgtccttcatattttggaaggttgggttatacccacatttcgtcacgctccaactttcccccgtaatcattccgttttctataaacttgccgaagaaagtgtagtcggtaaatttcgtcaaaccgtcaaaaacaaccccatgcaaggtctccaacttctccatgaaaagtgtttcctgagaaagagaagtcgcactttttatctgtagcgtaccatctatagtctgtaatttatcacaagtaatgcctgttgctttattaacgaacaacccttcacctcctacgtgaagcaattccggaatatccagcgatttactttgtaaagatattgctaacgaaccctctccctctttataatatacaggagaagctgaacaacaaactttggatagtaagggcaagttacaactggtaaaatttccagataaatagaactgtcctcccacttctttcaagactggcattgtgattgaagcaaacatgggtatttggatatatccatatccatctatgatttccaagtcgggaaatttggcattgcttcgcatttggcctgtcacatttagatttccatatacatgttgaattgtcgatatggtataatcgatattgttggtggttggcttacaagtgaagtctttgatattcttgaacgtgatttcagggaacttattattcgtgagactggtgatgacaaaatttacatttgacaaatcttcggctgtttcaattttggagagctgcaccttgtttataatttcaatctggggcgctgtttctccgaaggtttcaaatcgggcgttcggcaacagcagtgttccgctcacatcttcaagataatccagcgtgatgcttccaagtgtggtgatcttgctccagtcgggaagttgtttgagtgccgtgaaattctttatctttatctgtccctttatcgttgtcagtttgtccattccaccgaaagcctgaagcacgtcatttcgttggggaacaaaactaccggtaggaggagcttccatattggcttccataataatacttccgtttactgtttcgatttccggaaggttgatggtttccaacatcacggggacggtatggaaatcaaggccaccggtctctttcagcttaaggaagctcatggaagtcagcttggcaagattgtttacggacaagacccctccgacacttgtcagttccggtatttccaaagacgcaatcgaaccggctgctgtgttctcttcattgagtccttgaagattcagatcctgacctacagtagtcagaaccggaaactcaaaactctgtaacgacgacgcattgaacatcacgcttccttcaatagttgccagtttctcgaataggacatacgtcacttggtcgttatataccgatatgtctccggagagcgtttccaatgctttcatggaaatcatgtgaagttccgtagctttcgaggcgacatcggtcgaacctacctgtaaacctccggcagaaacgatattatccaaccctgtcaagtctgcaccgttgtaactgttacgaatgacaatgttgccagtaacctctttcaaagatgccaatgcagatatgtcagtgattttttctgcctcttccgcatcagagccgataatcaggttccctttgacaacggttgttttggttgcggcaaaagaagctacctcctcggtggtcttcaactccacatctccgtcagattctatctcgcttttcacgaccttataggtatattcgcgggcatctccgttataggatgtcacccggaaggttcgttcgttatcccagtccgttaccgtttcaggatcaggtatgattgttgcagaagttgtgtacttgaattccacttcggcgttgttcagcgataccgtatagggaacggttattgttactgtattgtccgtaatgtcggccgtgtacgatttcccgtccacggtcatcacgaccgatgtgatgaaattttcatctgcatcttcaggtataatttcatcgtttttgtcacacgctcccaaaaagaacaaggataggagcatgggaagaaaataaattttcatacttgtaatttttattatttggttagatcctcaaaagaaaatacctccgtagaaacttcgcccagccagccgcttttggccagaacaccgcattgtattttgataaagtcaatatattgcagattggcttccgttccatcggcatggatggcattggaaattttgaaaccgttcctttgtccgcttccatccaccgtactgccgccttctatctggtcgtttccgaaattatccacgtacccccagtcataactctgattatcccaataaccggtttgagaatcttgggtgttgcgggcggccagacaagtgcctgtcagggtataactgttttccgaaatccaagccggataataatagtcttgtgtatgataagcggacagatagtctacccagccgtttctaccgtcggaactgatccattggacatccatttttttgccttccggacggtaataggtcacttcaaaattctgtattgtttcttccttgcctgcttcagatcctttcagttcgtaccactcgtcatccggcaatccgtttccgtttatatcttgcatgacccatacgatacccggttcggaactgccgtcaaaggcgttcccctgaacacagaaatcatattggttacccgaattgggaatactgtggtcgaagccgacgatgatataacccccgaaagaacctaaagagacgtgcagtttgtctttcaaacgctgtgttgcccatgcgacagccgcttcaggggatgtttcgttgccggtcataccgcctatcgtgctcgtctcgttgataaattggccgggagctggggtatattcatagactttattccagagcttggaacttcccgaagcccggaagccgtcttgttcctttttgtccacacaaacgacttttacggtggcagtgacagccgttttccctttgtcgatattcctgcttattttttccgtcggtgtgtcttccgacacagtacaggagacggtgtattctccgggtgcggacggcgtgaacttgaacatgcgttccacttctccttccatgacctgaccgtccacactccactcaaaacggggattgtcgaaatactccaacaacggacgcaggaaaacaggacggtcggcaaaagtgtacctgtccgtggatgtttgcaggtaagacggggtcgggaatttgacaacgtagggcatcgtttccacgacctctacgcttacgtctttcgttgttgtcccatctatattggaagcgttgattgtcaccgtataaacaccgagttctttttcattgaaagtataagtattctcggtggaaacgatttttccttcccgtacccattcgattttgaacccttcgacatccgaatgctgaatatcgggagtaaatgtgtaatcggtattccggacgacttttagcccctgcgaaggtagtgccagtgagatgaccggaggggtgagttctttcacttctactttcagttcctcttcggcatagccttccgcattgtctactcttagtttgacataaaaatccccgcattcattccatgtacgttgaagagacggacccgaagaaaccagcgtaccgtctatcgtccaagcaaaaagagcatcttcaacattctggtatgtcggggcgatagtcaattcgtgatcgaccttgaccgtgtaaataccggtctcgctgtcaagttctattataggttgtcctcctacttcttcggtaatgacttcatccttgttgcaggaggtgaacagcatacaggcagaaataataaaatagtgaaaacgatgcatgatgtgtggattttagaaaaataacagggatacccccgacagaagggatatccttgtattctttttattgtatggtgatatcatcaatacagatataagccggagtattcaaaccgtatgctcccgaatccgaaccctcgaagttgaatttcacactttgcaccccttcggcattgatttcccaataatcccatgtcgtgataggatcaacctgttgttggccgttacgataatcggctaaaagacgtttgtaagtgcggatcagaccgccattcgcatcataacattccagattcacttggaaataccctttcatctctttcagaggagtcgctacccccgtagaaccgaactgattaccataagtaatgacaccataagtgtatgaggtgttgcagatccacaggccgaccaatttccggggaacattgaaataaaattctggtttagccatccatgcctgattgtaagcatccacatatccgtaaacgacaccgaaattggaaccgctgtgcccggcttccttattctgtccttccgcttccaccgcagtgttatagacagaacattggtttagataagaataccaccagtctccggtatttcccgactgattggagcggatgttccagttggaaagtgcgatgccgccgctggaatactctgtgcttccacctacagtattaaacattgaaaggaagagatattcttccggagtattgtcgtaaatggtggttacttgaggatacccttggtacgaataaagattttctccggccgaggtaggtcctgctaacatgccgggatcgaaatcatcgaaagtgatagttaaagtaccgtccggatttgtcacagcacgggtttgcgaagttccggaatcaaccgggtccatcaaaaagtcatcgtccgaactacagccagagaacaaggcggttgcggtaaatagacaggcacctgccagaaagcgtaattttcttttcataggtcactcattttaatgtaaaacatattattaacaaacacaaaaaattcccgttcgtgcggacttacacgaacgggaatatgtctgtcttcaaatattgaatggccgatgagctattccttatttgattacgacccgtatatcccgcaggtgtaaatctcattccggtcatggcaggtcttctgactcgtcccggtcatcgtgccttcccggtattacaccagtggcaaaagttcgatgtccgtttttgtggactcacagcagcgggtactgtcccggattttcaccgggttcccttttcattcggaaggcgtaaacctcccgaaaccatttcccgactgcaaaattatctatattacatatcaattccaaataattcataatatttataataaaacacacaaagcatgacaaccgtactgttttaattagagcattcaagtttacgacaaacgaagacggtaattatcatacacaatatccataaaccaacaaaacagcttgccattttccataacaatgcgttctggaatagataactgttagctgcaattatgcaagcaaaaaaagcagacagaataatgactattaatatcatgcaccagaaattaatcctataaatttatggaaaacaagtaagggaatggaagttccgttgccgcatggatgcaggtgaaggaccttctcttttaacgttggatacgccaatgcacgccaacggaagactctgatattatctgtttggaaaggatataggatgtgcgttactttgtcgcatattcagaatcttaaaaagaattttagtatggaactgacaattattgaaacaagcgcgtattaggagttgagaaagctggtcagcacgctggtcgtacagatgggcgacttccagaaaaagattgccccgcctgcgccggacaagtgaatggatgcgcaggacgtatgtgatggacttatgcccaaacactttctgaagagtttccagcagcatccccttgagtatggccagaacggcaaatgcgtggcgtccgatgtgcggggtgacctcgccccggagttgcatttcctgcctatgattccaagactgagccgcatggcattgtattcacctaccggaaagacacattcggggagtctttcttttcatccgtacccctatatttttcaatcagttcgatagcaatgggcaataattttacgacatacgccactcccgtttttatacggttgcccatcagccatgtaccgccgtcggagtcggtatggatattatcgtatgttatggctttcaagtccacataggaaagaccggtgaagcacatgaacaggaacatgtcgcgcatggcacgctggcgtttgtatctcggttctatatggattatcctttgcagttcctcttcggaaaggaaagaacgcctcttgtattcgggcatacactcgaatgatgcgaacggatgaacccgtatccagcctttttcctgcgcgatatacatcagccacttcaaggtattgacacgcccgaagacagtggagtttgccaaagcgcatgtaccgagcatccagttgtagtaatcctcgatgaatgatttctcaagttcttcgatgacaatatcctctgcattcttcttgcttttcatgaaaagcaggagactcttgtaatcggcaaccagaccgcagtaggtgctttcggctttctctatgccgattttctttttatacggttccagctgttccctgaaaaggttcataagggtgtggcattcctctgagaagccgacatagcggttatagactttcttggctgtaacaaaactgtcgtggtcgcagatgtactggtagtgcctggtgatttgcgccttgatattgtcaagctcctgattgagtgtacgggcctcctcggacttgcctttggcccggttggttttgacgtcccacaaagcgagggacacttctttcttacaactgaaaccggcttgggttccattgatggtgatacggcccataatcggtgtctttccgttttttacagactgtttattctcaaaacacttagctatacatggtctgcgataagctaagagagattccccttacacaaaagcatggcatctccttgtcgtatctcgcctttatacttttatgtatagtagtctaccggatcgaatgaacaagacctatcccatacataaaccaatttagactgctatgttatttttgaggaagaagatggaatgagaccagataccctctttaaggctgactgtaagtcgattaaatgtagaaaaagattgcttttgtcacaagtaaagtgtatatttgcattgaaagaatcgttctttgacagaggcaaaagaaaacagaatattgtaattcgctcgtttctaaatcgttacctgatattaattaaacagaaataactgtttaattttcaattagatagagattgtatgatgtttcgccacgtgcattgtcggattgaatgacaatccagcatgtctggcaacatgccgcaaggacatgttcatcgtcttatagtagcgtttgatcggaaagaccttattaccttccagatgcagatttttataacggtcgtagatcatttcagcaacgggaaggagtttgacacggaattgtgtacctgtcttttgccgcttgtcgatgatccaataatccccattgtcgtctgtatgaatatcggcatgggtcagctttgctacgtccgaatggctcaggcccgtaaaagcgcagaagacgaaggcatcccggttaatgcccgttcggtagttaggaagttcgacgtccatcacggcctgcaattccgaagcggataaatagcgccgttcggcgtatttaggcctgacatggaaccctgcaaaaggatcgacgagaatccagccgttcttataggccgtataggtcatcagacgcagtttcttgactccggcacagatcgtcccggaagcaagaccctttaccgtggagaggtagacgacgaacttttcgataaactcccgcttcagctctttgaacggaatgtcctttacatggtattcgtattcgaggaaagcggcaagacgcctgcgacgcagacagtaatcctcataggtggaataagcgcggtctttgcccacacgcttgcggaactccgcaagatattcgtcgaaggtctgtaacagcaggcggcaatcatcgcccataccgaggaaggcgttgcggaccttttcggccgttatgtatgaatcccggtcgcagagacgctgatactgtttgccgatattggtcttgatattctccaatttctcgttgatgcgctgcgattcgagacttttgccggaagctttgttggctttggcatcccagagggaggaacggacggtgagtttgcagctgaattgcgacatcgtgccgttgatggtgatacggcccatgacgggaacctgacccgatttttcggactgccttttcacatagaaaaggactttgaaagtgctgcgttgcatgataacttgaactttgaggatgggttaaacgttaagtcaagttatttgttatgcggaaattcaatgcaacgaactgaaaacgactgtcttaaatgcaaataaaagcatttcgggcaggtaacggataagtaacacaactcaccgttaaacctgcccgattttgcttttctattgctcggagcacatgcagaagagagaattaaataactgtaaacaaaatatttactcttttctgcactttctcttacctacaaaactccggcttgtaaggccggggattttttgtgcagttcccggtgggtcggatcggtccgtcgggtattgtttgcgacgaatttggggattgaatttctgtttgtcagatgcaaactatattttttagtttaaaaactatgtaaaatagttggatgtgaattttttttagttacctttgctggcggacaccgggatatactcgtttgcccggttttaaaaacaaccgacgctatggaaaaactgacacgcagggaagaggaactgatgcgctgtttctgggaacacggcccgctgttcgtgcgggaactggtcgcgctggccgccgagcctaaaccccatttcaatacgctctcgacgatggtccgcgctctcgaagccaagggctatgtcgctcacaagaccttcggaagcacctatcagtattatccggtggtgaccgaagaggagttttctcgccgcacgcttggcggtgtcatcagcaagtatttcgagaattcctatcttggggcggtttccgcgctggtcgaggaggagaagatttcggtcgaggaccttcgagagctgatcgaccgcatcgaaaatcaaaaccgccggtagccatgtacgccctgatgatctacagcctgaaggtcggcgcctgtctggcggtgttttacctctttttcaaactgctgctgagccgcgagaccttccaccgcctgaaccgtatcgtggtgctggcggctatggtgctgtcgtttatactgccgttctgcgtcattacgatctaccgtgaactgcctgccgcaccggagatgccagctgcggagcagctcttcgaggcgcctgccgaaccgcagcccgaaccgtttccgtgggataaggccgcggcccttgtttttctgaccggagcgggggcgacgctgctctggacgttcggatcggttttcggcgtgatccgcatgatccgccggggacgtcgtgaacgtctggccgacggaacggtgctggtgcgtatcggccgctcggtgacgcctttcagctggtatcgttatatcgtattgtcagagaaggatttgtccgaaaacggcgacgcgatcgtcctgcacgaaaaggctcatctgcgtttgcgccattcggtcgatctgctgctcaccgatctcgcgggctgcctccagtggttcaatcccgcgatgtggctgcttcgccgcgaactgcgggccattcacgaatacgaagccgacgaggctgtcctcgacagcggcgtcgatgcgaaacattatcaactattattaataaggaaagctgccggcgggaggtggtactcagtcgccaacagctttaatcacagtaaacttaaaaaccgtattaccatgatgttacgtaaaagatcgtcgcggtgggccgtagccagagtgcttttcgtgctgccgcttgcgggactcgccctcggagccttcgcccgcaccgcctatgtttttcctgatgacaaaggtaaaaaagaaaatgttacgattctcattcggaacgcaaaaatcgacccttcggacggaaaatccggcaatccgctgattctggtggacggccgcgaagtgaaatcgatcgattcgcttcccgccgaccggatcgcttcggtctcggtgctcaaggattccgtgtcgaaagtttcgtacggcgaaaagggccgggacggcgtgattatcgtcacgacgaaggaggacggtgccgactcgcagatgcagacgttcacgtacggcggcaacagcagttcgactgccgtcgtggtgcgcggcgtcgggacggaggctgattcccttgcggggagagtgcgtacgatgacctacaggatcgacggcaggcgcgactcgctcggcggagacatggtctggaaaataaacgggcgggacgtcgatgccggcgacttggaagagttgtccggaaacgtccggtcgatccgcattaccaaggacgccgccgtgcagggggaagactccgctgctgcggaggggatgattcgcattatgaccggacagacgatgcaggctgcggacgccggcctgaaagccgccgaagcggggatgcaggccgcccgtgccgggctggatgcggcacggcggtatatgtcggccgaggagtggaagcaggcgcagaaacagctcgaagcggcgcagaagcagctggacgaagcccgcgcgcaggcaaagtcggaaatctccttctccgaggcgatcgcagtcgatatgcaggactcctccgccgatactgctgacggcggggcggtcgtcgcgggtgcggcgtcggaaacgccgtcttattggcgcgttacgaccggcgaaggcacgacgcgcgtggatcattcgaaaacggagtcgggcaaaacggtctttacgggccgcgtcacgctgcacaatccttcggagataccggataactacgtgattttcattaacggcgagcaagcgtccaaagcggacgtgcttcggcttgcaccccagaaaatcaagcgtatggaggtgttgcggggcaaggaggccgccaaggaatacggtgccggcagcgagggcgtaatcaagattacgacgcgcagatagtcgcaggtaaccgcagacagccggagggggacggattgccgggttgagacgataaaatccgttgccgtccggttgtatacgacgaaaaccaaccgccataagcataaaaagttcgcgcccggaacggttttgccgttccgggttttttcggcgtgcgggcaatgcaggcccgaaacttgcggaaatcgcccgtgacaggttgtccttgcctgcgtaaattccggttggcggcagtctcggcgggcgtcggcgcggtgaattttcagcccggccgccgtcggttttgccgggacgacgccttccctgcggagaaccgttccgggcgaaaccgaaaaatttggttctgcgcccggcttgcgctatctttgcaagggaaacacaaaacagaagctatgaaacgcctgctattttttcttacagtcgtaacgctcgtctcgtgcggccggtcgttcgaaaaacgtacggccaaatatgccgaagtgggggagatgagcgacaaccgcgcggccgtgctcgatatcaacgagggcgtaggccgctggggctatgtcgatggaacggggcggctggcgatcgaatgccgctatgccgacgcccgccgatttgccgacggactggccgcggtacaggtccccgaaggagcttggggatatatcgacaccgtgggacggctcgtgatcgctccgcagttcgtgcttgccgaaccgtttgaggacggcatggcgtgggtgcaggccgcgggcgagctttggggccgcgtcgataagtcggggaagatggttattccctgcctgtactccgaaatcggcgagccggacgagcggggctggatgcgcgtgctgcgcgacggcaagtggggctatctgcgcgaaaacggcgaagtggtcgtgccgtgcgactacaatctgatcggcgagcctaacgcatacgggctgattcccgtgacgagcggcggcaagcacggcttcttggacgccgacggccgcgaagtgcttccctgcttcttcacctacatttccgatttcaaggacggctatgcccggaccaactacggaggcagcatgatgctgcgcgacgagccttacggcgggcagtggggactgatcgacacgctgggccgcgagacgattccgtgccggtactactacctcgatacgccgggcgaaggacttgcggcctttatgctcgaacagttcggcaatttcggctatgtggacgtaaagggcaatgtggcgatttcgccccgtttcgccgtggcgaagcccttttcgggcggtgttgccgtggtgagctacaacaatgtcaattacggacttgtggaccgcaacggcaatgaagtcagttcgttccgctataaacgcatcggggagttccacgatggtctggcgccgttcaataccaacctttacggcatgaattttcaggggatggagccgcgctgcgggtatatcgacaccgaagggcgcgaagtgcttcccgccaagtgggacgatgccggcgagttcagcgagatgcgcgccccggtgatgcgtttcggcgtaaattccgaggatttctacgacgcccgctggggctatatcgccacgaacggccagctcgtcgtacccttcaaataccacgaggcatatcctttcagctgcggtctggcccgcgttttcgtcaaggggctggggtacggctatatcaaccgcaagggcgaagaggtcgttccctgcaagtatcaggaagccgaagatttccacgactttacggcgaaagtgaaacagtacgaccgggtgatgacgatcgacgacaaggggcagatcgtcgaagggcaataaaaaaacggaggtccgagacctccgtttttttgttggctgtccggtccgccgacttatttgaatcccacgatttcgggccgtgtcggacggtaacggtattgttcgatgcgggtctggttcgatacgcggacatattcgctctcgaccagtccgcgtttgccgaaggcgagtcccagacgtatctgtatcgtgttgaaaatcagcctttcgttcttgatgcgcacgccgaagccgaacgaagtgaagaagtcgttcttgaagatgttgggggaatagccgatcagtccgaagtcggcgaatccgaacagggcgatacggaagccgaggggctgatagggcgtgaaaaatacggtctccgtgttgaggatcatgcggttggtgccggtgacatgctccttgagcgcctgcagtccgtttatgcgggtcatgcggattatttcgtcgctgcccgtgccgcggttccagccctgcgtatagttgaaggccagaaactggcggatgcggctgcgtttgaacatgaacaggttcgagaaccacttcaggtccacgtccaccgcactatggcgccacatgccggttgcgaggtcgatatagcttcccagcgtgatacttcccatgacatagcccaccgagcggaatccgccggtcgtataggtcatgcccagatacatttcgtcgttgaattctccccacgagtatccgctgaccagctcggccttgtaacccgtcgcaaggtactcccttgtgccgaatccgtagatcatgttggccgaatagaacttctcgcggtagagaccggccccgaagagcatggcgtcgtagtcgtgcagcgcggggttgtggttgggggcaaccagcggccgccggctgaaacgggcgtagctgtagcgtcccgtgaaatatacgctcgaattgatggagcggatatagcgcgacttgccgccccatgcgtccagattgcggaccttgatgagcagcgaagtgtcgaggtcgatcatgtagcgcttcgacttgacatcgctgtacgtaaggccgatttcatagtccgtcggacgtatgaactccttgcgcagccccatgttcagctccgagttgtagaagtcgcgtccggccgaaaaatccgccgtgtagaaacttcccagaacgttggggatttcgtattcgacgatgttgccgccgtatgagaagtctttgcggctgaagttggtattgaacttcagggtgttgccccagccgaaaatgttggcgtccgacagtccgaccatcgtgcggccctcgccgtggatggcgccgtcgacgctgatcgtccagctgtcacgggtgcatatgaccatattgacgcgtgtcgaatccagcgaatcgggcatcagggtgatatcgacgtcggagatgtaggggcgcgagcggagcagctgcttgttgcgcacgatcagctgcgggtcgatcttgtcgcccggcttgaagagcaggtcgcggcggatgacccggtcgcgcgtcagcaagtgtatcttgttgcccgtacgttcgagccagttgccgtcggagtcgaagggatgctgacgctcgatggtgatgtcgcccacggtttttcccgcatagggtttcagcaggcggctttcgtccactacgcggccgctgaatgtggtgtccagcacgggctttacgaaaagcattctgtagagcatgcgcggcacggcgcggcggttggtcttggattggatgctgtcgtacagcctttgattgcgttcggaagtggcggtgttcaggctgtcgggcttgaatccgtcgggcgagtttatgttgggagaagttatttcgggaccgcgcatgccgggaccggccgttcgggcgaaacaaacgctcactgccgcgaggacggtcagtacgagtatgcagatccggcgatacatgtcatcaaagataacgtaatttttcggcaaaacgtataaaaaagcgcttccccgaaacaggaaaagacggccttggcggtcgtcttttcctcaatatacactctctgcggatgttatctccgggcatgtcctgcgatttttccgccttccggaatcgtaccgggcccgtgacgccgcgtcggagtccgtctgcgcgcccttccggttctacctgcgtccctccttggcctcgatacactcggtggcgtggggcactttcatcaggcgctccttgggaatgagcttgcccgtggttttacagatgccgtaagtcttattctcgatacgcacgagcgccatttccagattgtgtatgaacttcatctggtgcgccgccaagcgtccgctctcctctttcgagagagtcgctgcgccctcttcgaggaccttgaacgtcggcgaggtatcttccgtgtcgttgtctgccgtgtgggtgatagtggcgcgcagcagctcgtagtccgcacgcgcgttctccagcttcttcaggataagctgcttgaactcttcgagttcggcgtcgctgtatctcgttctttcgtctgccatagtcgtcttctccttaattaggttttatgtaaaattaactatttttttcgtaaataccaaattttacatctcattatacgattccgcccggacatacccgcgcatcgtgctcagcatgaaacgcttgccgttccaaattcaccgaaaaagggactcggagacgttccggacgggctaaatccgcgttacggcgatccgtaccggctcgtcatcgacatccgaatcgacgatcactccgcccgcaggttgtgccgcggtcttgacctcgacggccagcgtctgcgatgcgatgtaaccggcgtatttggcgacggcgtcggccacgagctccttctgctcgatctcgacccggatcttgtccgtcacttcgaatcccgaatccttgcggatattctggatgcggtttatcaactcgcgtgccacgccttccgcgcgcagctcctccgttacggtgatgtcgagcgccacggtcagcttgccttccgacgccacgagccagcccggcatgtcctccgaggtgatctcgaaatcggcgggggttacggcgatcttctcggcgccgaggtcgaggatcgtctccggagcggcttcgatttcggcgatccgctcctgcgtgaactccgcggtcatggcggcgatctgcttcatgtatttgccgtagcgcggtcccagcgtcttgaagttgggcttgatgcgcttggtgataatgcccgccgtgttctcgatcagctcgatctccttgacattcacctcgttcatgatgagcgtcttcacggcggcgatatgctgcgccattgccgggtcgagcaccggaatcagtattttggtcagcggctggcgcaccttgatcgagactttgcggcgcagggccagcaccatcgacgatacgcgctgggccagcgacatcatctcttccagatcggcgtcgatcagcttcccgtcggccttcgggaaggtcgagaggtgtaccgattcgtccgtatggcggccgcttacggcgttcaggtcgcagaaaatgcggtccgagatgaacggtgcgaacggcgccgcgagcatcgaaacggtctccagacaggtgtaaagcgtctgataggccgccagtttgtcctcgttcatgccgccgccccagaaacgcttgcggttgaggcgtacgtaccagttggagaggttttcgcccacgaactcctgaatggcgcgcgccgcaggcgtcgggtcgtaatcttcgagcgaacgcgtcacgtccctgaccagcgtgttgagcagcgagatgatccagcggtcgatctccggacgcttctccacgggaacctccggctcccggcccgtaaatccgtccacgttggcgtagagggcgaagaacgaataggtattgtagagcgttccgaagaacttgcggcgcacttcgtccacgccgtccctatcgaatttgaggttgtcccacggctgcgagttggagatcatgtaccagcgcgtggcgtcggctccgtaggtggccagcacctcgaacggatcgacgccgttgcccaggcgcttggacatcttgttgccgttcttgtcgagcacaagaccgttcgaaatgatgttcttgaaagccaccgagtcgaacagcatcgaggcgatggcgtgcagcgtgaagaaccagccgcgcgtctggtccacgccttcggcgatgaagtcggccggatagaccgtcttgaaatgctcgccgccgttctcgaacgggtagtgcagctgcgcatagggcatggctcccgaatcgaaccacacgtcgatcaagtcgctttcgcgcttcatcggctcgcccttcgacgagaccagcacgatgccgtccacataggggcggtgcaggtcgatatttttggtcgaatagttctccgccgacatgtcgccgaccttgaaatttttgtagggattctccttcatgaagcctgcggcgaccgacttttcgatttcgcccgtcagctcttcgatcgagccgatgcacttcagctccgagtagtcctccgtcgcccataccggcagcggggttccccagaagcgcgaacgcgaaaggttccagtccaccaatccttcgagccacttgccgaaacggcccgtgccggtcgattcgggcttccagcggatcgtcttgtttagttcgatcatccgctcgcgcagggccgtggtgcggatgaaccacgagtcgagcgggtagtagagcaccggtttgtccgtacgccagcagtgggggtaggagtgggtgtgcttctcgatcttgaaggccttgttttcggctttgagcatcaccgcgatgtcgatgtcgagcgtcgtctcggcatcgcaggcgatattcggatcgtatgcgtttttcacataacggcccgcatactccctgtattttgcggcgtcgacattatttttcacgaattcgggatcgagctcctccagcagaaagaatttgccctgcctgtctaccatcggctgatttttgccggccttgtccaccatgaacagcggcgcaatgcctgcggcgcggcctacgcggtcgtcgtcggcaccgaacgtcggcgcgatatgcacgatgcccgtaccgtccgaagtggtcacgtagtcgccgacgatcacgcggaacgcgtcgcccatcggctttacccacgggatgagctgctcgtagcggatgccttccagttcgggaccctgccagctttcgcccgtaatctcataggttccctccattttcttggtgaagtatgcgggcacgagctctttggcgaggatgaccgtctgcggacggtcggtataggggttgcggcatttgaccttgacgtattcgatcgcgggacctacggccagcgccgtgttcgagggcagggtccacggcgtggtagtccaagccaagaaatagagcggtccctcgacgccggcgaaaagcttctcgctcttctggtcgcggatgacttcgaactgcgccgtgcaggtcgtgtccttgacgtcgcggtagcagccgggctggttcagctcgtgggtcgagagacccgttcccgccgccggcgagtagggctggatggtgtagcccttgtagagcagccccttgtcgaagagctgcttgaggagccaccacagcgtctcgatgtatttgttgtcgtaggtgatgtagggatcgtccatgttgacccagtagcccatcttgcgggtcaggtcctcccacatgcccgtaaactccatgacggcttcgcggcaggtgcggttgtattcttcgatggtgatctttttgccgatgtcctccttggtgatgccgagcttcttctcgacgcccagttcgaccggaagtccgtgcgtatcccagcccgccttgcggtgcacgaggtagccctgctgcgttttgtagcggcagaaaacgtccttgatcgtacgggccatgacgtggtggatgcccggcgtgccgttggccgacggggggccttcgtaaaatacgaacgcggggtgtccttcgcgcgtggtgatgcttttatggaatgtatcgcgggcgtcccactcgccgagcacgtcggcggccgtctgcgccagatcgagacctttatactctttgaacttcatggtgtatgtgttttgttttcgttcggatcctgcacccggagcaaagccggaactgccggaaacgtcattcgttttccgacaactcgcaaagatataaaaaagatttgaaaatctgcaaaattccgccgattaggccgccgccgcaaaaacggcgtgggcttattccgcgatcggcatttcgacccggaagcaggaaccttcgccgacggcggaatcgacgccgatttgtgcgcccatctgctccgcgatgctcttgcagatcgaaagtccgagtccggtgccctgcgtgaaggtgtccaccttgtaaaaccgttcgaagattttgtccagctcttcggccggaatgccgatgcccgtgtcgcggacatagagactcagccggtcccgtttgcgttcgaatcccaccgtgacgaatccttttggtgtgaatttcagtgcgttgcggatgaagttggccaatatctgcatcagcccctgcctgtattggcagacggtgcaggagggcagtcccttttcgacgtccagcacgacttcctccggagtctgcaggcggaacgtttcgacggcttcgcggcagagcgtccgcaggtcgaaccgggtcctgaccagatcggcatgccccgattcgatgcgcgagaggtccagtacgtcggatatgatctgcagcagcagtccgttgttgagcgacacgatgtcgttgtactctttgcgcacttcggggtcctcctcggtggtcagcagctgcgaaaagcctacgatggcgttgagcggcgtgcggatttcgtggctcatgttggcgaggaacgccgtcttgagcttgttggactcctcggcccgctccttggcggcgatcagctcctgctcggtctgtttgagcgccgtgatgtcgtaattgattcccagcatgtcgatcacctgctcctgcggccggtagtcgcggcagatgaggtggattttgatccatgtcgtccggccgtcgtcgtgcaggacgcggcaggagaccgatgccgactgtatctccccggactcgaactgcgccagccggttcagcagcaccgtgcggtcgtcgggggggatatgacggtatttgccgatgacgtcgccgatggcggccgtgtcggcttcgccgtagttgcgcagccagacgctctgcgcataaccctctttgttgcagaggttgtagttgatgtatcccacctgcgcgtattcggagataaggcggaacagcgcttcgaattccgtgagccggtcctgcgtctggcggagttccgtgttgtcgatgttgatgagcaggtagtgggtgatttcgcccgtgtcgttgtagagacaccggatgcgggccgtccagtcgatgtagccgctccggctggtgtcgtaatagcttcgggctttcgaaaaatcgtagcgtgtggtgaagtccgtaccccggccttcgcggatgcagtccttgatctcggccgagaagttggggttgtcgaaaatgctgagtccccggatgcctgccggatcggttacgccgaacatttccagatcgcgggcgttgatgtccaccagatgccctgtgcggtcgtatatctcgatgccgatcggggcgttctgaatgacgttgcgcagcagtttctccttttcgtcgagcgcctgatgcgccgtgacgacgtccgtgatgtcgaggatcaggatcacgatctccgtcgcgtcgttgggggtgttgtagaggaagctgcggcagtagcggccggttttggaggcatgccactggtccatcttgtaatcccccagcctgatggccgccagctcgtcgatgtgccggtctacggggatgtctatttcgcgggcggtcttgtcgaggtaatcagcggcgtctacgcccagaatctgctgcgccgtctggttgaccgagaggaaaaggtagtcggtcgcctggccgtcgtcgtcgtagagcagccggatgcggaagtagccgatcggcaggtggtcgagcagctcgtccatgtgtttgttctccttcagcaccgcgtaatagttgctttcgagcgtgaggacgtccgcctctttccggccggcgaccggaacgcgctggaggtagccgaagagtttgatgccctgctgcgggtccgattgtttgcggacgagctgcgtatggatccatatttcgccttccggcagtacgacggggaacgtttcgtcgaaatggtttccgaccttgagcgacaggaattcgttgtgtatccgtgtccggtaatcttcgcgcgtcagcggcatcagttccccgactgcggcccggttgctgccgagtcccagcagatcgacgatgtagtcggagaagaacagttcgcccgtgcggaaatccgccttccaccaccccatttgggccgcgtcgagcagctgcatcaacgattgaagatcgggagcgccggaggtaaacataacggagtcgcagttaagtgtatgaaagcgtgcgggtgacgcgggccggattgccgacggcaaccgaatccgcgggaatgtcgcgcgtaactaccgaacccgctccaattatcgcgccgttgccgatccggacgcccggacagacgatgacgccgccgcccagccagcagttgtcgccgatggtgatcggtttgccggcttcgcggcctgtcgcacgcaggtcggggtccagcggatggtgcggggtgagcagctgtaccttgggccctatcagcgtattgcgcccgatacggatcggagccagatcgaggaagacgcagtcgaaattgacgaaagagccttcgccgatatggatgttgtagccgtaatcgcagtaaaagggcgcgcggatgaatccggctgcattgggacagagctcgcgcagagcggcgcggtatgctgcgtcgtggccgggacattcggcgttgagccggtgcatcagcagcgtggcgcggtcgcggtcggccgtcagctcctcgtcgcgcgggtcgaaccattcgcccgccagcatcttctctttctcgcttttcatacgagcgggatattttattcgaacgactgcagttcgatcagtttggcgtagattcctccgcgggccatcagttcggcgtgcgtgccctgttcggcgatgcgtccgtgatcgacgacgatgatcttgtcggcgttgtggatcgtgctcagacggtgtgcgatgactaccgaagtacggccctccagcaacttgttgagggcgtcctgcacgagtttttcgctctcggtgtcgagggccgaagtcgcctcgtcgagaatcaggatgtcggggtttttcaatacggcgcgggcgatggagagacgctgccgctggccgcccgaaagtttcacgccgcggtcgccgatattggtccgatagccttcgggcgcttcggtgatgaagcagtcggcattggcgattcgggccgcttcgacgatctcctcgtgcgaagctccggccttgcccatggcgatgttgccttcgatggtgtcgttgaaaagcacggtgtcctgcgatacgacgctcatgtgtgcgcgcaggctctcctgcgtgtagtcgcggatcgaaacgccgtcgatgaggatgtcgcccgccgtaacgtcgtagaaacgcggaacaagctcgctgagcgtcgatttgccgcctcccgacggtcccacgagcgccacggtctccccgcgtttgatgtcgaacgaaatgccgtcgatcacctcgcggctgccgtcgtaggagaagtgtatgtcgcggaattcgatcttgtctttcaggccgttcagctccagcgcgccgggcttgtcctgaatttcgctctgggcgtcgatgatcgagaagatgcgctctccggccgcgatgccctgattgatgttggcgaactggtcgatgaaggtgcgcacggggcgcgtgatctgcgagaacatggcgacgaaggcgatgaagccttcggggctgagcgaccccttgaatacgagcgaaccgccgaatacgaggatgacgcccacggccgagatgccgaggaattcgctcatcggcgaagccagctgctggcggcgcgccatcgagagggtcagccgggccagatcggcgttcaggtcgtagaacttctgcttgatataatccacggcgttgtagctcttgatgaccttgatgcccgaaagggactcgtcgagcgtcgataccagctcgcccatgcgctgctggctcgtgcgggccgggtggcgcaggcgtttgacgatgctgccgatgatgagggccaccacgggcagaaacagcaccgagaagagggccagctcccacgatatggcgaccatcatcaccgtgtagccgatgatgaggaacggctcgcggaaagccacctgcagggtgttggtgatgcagaactgcaccacgccgacgtcggaggtgattttcgaaatgatgtcgcccttgcgctggtcgctgaaaaagccgacgtgcatgtccaccaccttcgagaacatctcgttgcgcatgcgctgcagggtgcgggtgcgcatgttctccaccgtccaagagcccagatagcggaacaggttgctcagcaggctcacgaaaatggtcaccacggcgagcatgagcagtacgttttcggggttgtattcgttgaacagatgcgagtaggtgtagttgaacaaggctgtcaggtattcctgattgaaggccagcgggggaagtttctccacatatacgaacgtgtagtcggcgtcgaacatcgtcttgaggatcggcatgatcagcaggaacgtgagcgagttgaacagcgcgtagagcagcgagtagaagaaatagggaattgcgtatttctggatgggtcgggcgaaacccaagagcctcatgtatattttaagcattacgggcggattatttgcaggttatgtgataatcgggacaaagataggaataataatgataaaatcggaccctgcgggtcaaaagtgcgaagtttaggagaaataagggccgaaaaaggaaaagaggcgggcgttgccgctcacctcccttccggttcataaccagtgtcttccgataaatgcgccttgtcgttggcggcggccacggccagttggtcgcagcggttgttctcgaccgtatcggcatgccccttgacccatacgaaccgcacgttgtggcgtcggtatatgcgcaggaaacgcatccacaggtcgggattcttcttgccggcgaaccgtttcttctcccagccgaacacccagcctttcgtcacggcgtccacgacgtatttcgagtcggaatagaccgtgacgtccgacccctcgaacttgagcgcttcgagcgccgcgcagacggccgtcagctccatgcggttgttggtcgtcaggcggaatccctgcgaaagctccttgcggtgagggcccgaaagcagcaccgcgccgtaaccgcccggtccgggattccccaaggccgagccgtcggtgtatatggtgatttgtgccacgccggattatttcagcgccgccagctgctccctgatggccgcgattttcgcttctgcgtccgcctgcttggcgcgttcgttcatgactaccttttcgggcgccgactgcacgaagcgctcgttcgagagcttcttcatgacgcttgcgaggaatccctcgtagtaggcgagactctccgtcagtttcccgatttcggcttcgacgtcgatcttgcccgccatcggcacgaaatactgggtcgtcttgacgatgaacgccgcggccgcggggtctttctccgtcacggtttcgacggccgtcaggttggccattttccgcatcacgggagcgtattcggcggggtagttctcgtcggcgatcaccttgagcgtcagcgcttccttctgcggcaggttcttctggttgcgtatgttgcgcaccgaggagatcgcctccttggccagctcgaaccgggccagcaggcgctcgtcggcttcgaccggctgcggcatgggggccgtgcagatcgactcgccctctttgcggggcgcgaggtcctgccagatctcctccgtcacgaacggcatgaaggggtgcagcacgcgcatcaattcgtcgaagaatccgcacgtcgcggcgaacgtctccgcatcgacgggctgtccgtaggcgggtttcaccatttcgaggtagagaccgctgaagtcgtcccagaagagcttgtaggccgtcatgaacgcctccgaaatgcggtacgacctgaagtcctcgtcgatctggcgcagtgcgcggcccagcgtctggcggaaccattcgaccgccagccggttgttgtcgtcctgcgcggccttgtcgtccgccgaccagccgttcaccagcctgtaggcgttccatatcttgttgccgaagttgcggccctgctcgcagagcgcttcgtcgaacatcacgtcgttgccggccgacgacgaaatcagcatcgccatgcgcatgccgtcggcgccgtatttggcgatcaggtccagcggatcgggcgagttgcccagctgcttggacatcttgcggccgatcttgtcgcggacgatgcccgtgaagtatacgttgccgaaaggcttttcgccgcggtattcgtaacccgccatgatcatgcgggccacccagaagaagatgatgtcgggacccgtcaccagatcgttggtggggtagtagtagcttatttcctgattgtccgggttacggatgccgtcgaagaccgaaatcggccagagccacgacgagaaccaagtgtccagcacgtcctcgtcctgacgcaggtcgctcggctgcagcgagtcgtcgccggtctttgcacgcgcctttgcgagcgcctcttcggccgtcggggccacgacgtatccgcccttgggcaggtagtaggccggaatgcgctgtccccaccacaactggcgcgagatgcaccagtccttgatgttttccatccagtgacggtaggtgttcttgtatttttcaggcacgaagcggatcgcatcctccatgacggctttggtcgcgggccgggccagctcctccatcgaaaggaaccactgcatcgagagcttcggctcgatggccacgcccgtgcgctccgagtatcccacgttgttggtgtactcctcggtcttttcgagcaggcccgccgcggcgaggtccttctcgatctgtttgcggacgtcgaaacggtccatgccgacatacatgccgaccttgtcgttgatcgtgccgtcgtcattgaagatgtcgatcgtttcgagaccgtatttctcgcccagcatgtagtcgttcacgtcgtgcgccggggtgaccttcagcgcgcccgtgccgaattcgatatcgacgtattcgtcgcggatcaccgggatcgaacggttcaccagcggcacgatgacgcgcgcatcgaccggcagggaggcgtagcgcgggtcgttggggttgacgcacagcgccgtgtcgcccagaatggtttcggggcgcgtcgtggcgacgatgatcgccttgtccgtgccttcgatcttgtagcgcaggtagtagagtttgccgtgcgactccttgaagaccacctcttcgtccgaaagcgccgttttcgccgcggggtcccagttcaccatgcgtacgccgcggtaaatcctgcccttttcgaacaggtcgcagaagactttgatgacgctctcggtgcgcggcccgtccatcgtgaagcaggtccgctcccagtcgcacgaggcgcccagcttgcgcagctgcttgaggatcataccgccgtacttctccttccattcccaagcgtattcgaggaacttttcgcgcgagagcgacgatttttcgatgcccttttcgtgcagcatcgccacgaccttggcctcggtggcgatcgacgcgtggtccatgcccggcacccagcaggcgttcctgcccgacatgcgggcgcggcgcaccagcacgtcctgcagcgtgttgttgagcatgtgacccatgtggagcatgcccgttacgttggggggcggaattacgatcgtatagggttcgcgctgatcgggttccgagtgaaacaagcgtttttcgatccagtagtcgtaccatttcgactcgatctcctgcggcgagtatttgtctgcgatttgcatagggatgaaattgttttacttcgttatttgacctgcaaagttattaacattctgtcaaagatgaaataaatatgactaaaaaatcgttacctttgcgacattatatatttgtaagctatgagtaaaaaagataaattcgaaacaatcgaagtcgaagacgtgaacctgcttcccgatctgctcgacggcaatcaccgcgtgatccccatcgtgacgggcggtgacgaagtcgtcgaagaggtggaggttcctgagatcattccgattctcacgctgcgcagctccgtgctctttcccggcgccatcacccccattacggtgggccgcgacaagagcatcagtctggtgcgcgccgtgaatgccgaaggcggtattctgggcgccgtgctgcagcgcgaaagcgacgtcgaagaccccgcgccggacgacatgtacaaggtcggcaccgcggcgcgcatcatcaagattctcgaaatgcccaacggcaacctcacggtgatcctgaacggcttggagaaggtcgagatccgcgaatacattactaccgaaccctacttccgggcccgtgtcaccgcactgcgcgataccacgcccgatctgaagagcgtcgagttcgaagccctcgtggactcgatccgcgacgtggcgctcaatatcatcaacgtctcgccgtcgatgcccaaggaggcggcgttcgccattaagaacatcgactccaagcgcggcatcatcaacttcatctgctcgaacatggagctgacggacgaggaccgccagtcgctgctggaagcccccggcctgctggcccgcgcccgcaagctgctcgaaatactgatccgcgagcagcagctggccgagttgaaaaaccagattcaggagcgcgtgaagcaggagatcgacaagcagcagcgcgactactacctccagcagcagatgcgcacgattcaggacgagctgggcgacggcgccgacgccgacatcgagaagatgcgcgaggaggccaagaagaagaactggcccaaggaggtcggcgagaccttcgagaaggagttgcagaaagtcgagcggctgaaccccgccgtagccgagtattcggtgcagatgacctatctgcaactgttgctcgaactgccgtggaacgacacgaccaaggacaacctcgacctcaagtgcgcccgtgaacagctcgaccgcgaccatttcggtctggacgaggtgaaggagcgtattctggagcatttggctgtcatcaagctcaagggcgacctcaagtcgccgatcctctgcctctacggccctccgggcgtgggcaagacctcgctgggcaagtcggtggcggcggcgctgggccgcaagttcggccgcatttcgctgggcggcctgcacgacgagtccgagattcgcggacaccgccgcacctacatcggcgccatgccgggccggatcatccagaccatcaagcggtgcggttcgtcgaaccccgtgattatcctcgacgaggtggacaaggtgaccgtttcgaaccacggcgacccgtcgagcgcactgctcgaagtgctcgatccggaacagaacaccaccttccacgacaactatatcgacatggagtacgacttgtcgaaggtgctcttcatcgccacggccaacaacgtggccaacatcgccccggccctgcgcgaccgtatggagatgatcaacattccgggctatctggtcgaggagaagatccgcatcgctttggaccacctgctgcccaagcagcgcgaggcccacggcatcaaggagcaggaactcgtgatgacgccccaaatcgtcgaaggcatcatctccggctacacccgcgagtcgggcgttcgctcgctcgacaagctgctggctaagatcgcccgcgcccgcgccaagcagatcgctttcgacgaagccttcgcgcccgaaatcacggccaaggacgtcgagaagattctcggcatgcccaagttcctccgcgaggagtacgaagtgggcggcatgacaggcgtggtgacgggtcttgcgtggaccgaggtcggcggcgacatcctctacatcgaatcggtgctgactcccggtaagggcaaagtcagcctgacgggtaatctgggcgaggtgatgaaggagtcggcgacgatcgcccacgagtgggtgatggcccaccacgcggagctgggaatcgacgcttcggcgttcgagaagaacgacatcaatatccacgtgccggagggggcgattccgaaggacgggccgtcggccggtatcacgatggtgacctcgatcgtctcgacctacaccggacgcaaggtgcgggagcgtatcgccatgacgggcgaaacgaccctccgcggccgcgtgatgcccgtgggcggcgtcagggagaagattctggcggccaagcgcgccggcatcaccgaactgatcctttcggaggagaaccgcaaggacatcgccgagatcaaacccgaatacgtcgaagggctgacgttccattacgtgaagaccaacgacgaagtgctgaaactggcgctcgtctgaagcgaagatgcaagtaaaaggtgaaaagttttgattttcaccttttactttttatttttatggctaaataaccgagacgatgaaatttatcgcaatcataccggcgcgttacggctcgacgcgctttccgggcaagccgctggcgatgctgggcggcaggcccgtcattcagcgcgtctatgagcaggtggcgggcgtgttggacgacgccgtggtcgccaccgacgatgagcgtatctacgataccgtgctcgctttcggcggccgggccgagatgacctcgccggaccacaaaagcggcaccgaccgttgctgggaagcctatctcaaacagggcaagacctacgacgtggtggtcaatgtgcagggcgacgaaccttttgtccgggcctcgcagctggaagccgtgaaacgctgcttcgacgatccggcgaccgacatcgccacgctggtcaggcctttcgccgcgacggacggtctcgaagccctcgaaaatcccaactccccgaaagtggtgctcgacgcgcagtcgcgcgccctctacttctcgcgttcggtgatcccctacttgcggggcgtcgaacggtcggagtggctggcgcgccatacgttctacaagcatatcggtctctatgcgttccgcacggaggtcctgcgcgcggttacggccctgccgcagtccgcgctcgaaaaggccgagtcgctcgaacagcttcgctggctggagaacggctataagatcggcgtgggcgttaccgatgccgagaccatcggcatcgacacgcccgaagatctggagaaggcagaagccttcctgatcaggcatggaaaatgaaaagtcgggagtcgaagcccggctgcttggcgggcggcggcttccccggcctttgttcttaactcataatcgaatcttatgaagatcaaatttatcgccggaccgtgcgtcatcgagtctgtcgaactgctcgacaccgtggcgcagcgtcttgtggcgatcaacgaaagactcggcgcggacatcattttcaaggcgtcgttcgacaaggccaaccgcacctcgatctcgtcgttccgcggccccggactcgaaaaggggcttcggatgctcgccgacgtgcgtgcgaagtgggggctgaagctgctgaccgacatccatgaatcgtggcaggccgcgcccgtgggcgaagtggtcgacgtgatccagattcccgcgttcctctgccgccagaccgacctgctggtcgctgccgcgaagacgggcaggacggtgaatatcaagaaggcgcagttcctgtcgggcgccgacatgctctatccctacgaaaaggcccgcgatgcgggcgcttcggagatatggctcaccgagcgcggcaatatttacggctacaacaacctcgtcgtcgatttccgcaatattgcggacatgctgcgcatcgccccgaccgtggtgatggactgcacccattcggtgcagcgtcccggcgccgcaggcggcaagacgggtggcaaccgcgaattcgtacccgccatggcgcaggccgccaaagccttcggcgccaacggcttcttcttcgaagtgcatcccgacccggaccatgccaagagcgacggcccgaacatgctgcagctcgacgaactggaaaacctcattaaaactctgctataatgaccgataccacgaaagcccagattctcgatctggcccgcaaggcgatcaacaccgaactgctggcgctcaagcgcatgaaggagacgttgggcgataacttcgccgacgccgtcgaaatgatcctttcgggtcagggcaaatgtatcgttacgggcatgggcaagtcggggctggtgggacgcaagatcgccgcgacgctcgcctcgaccggtacgcccagcttcttcctgcatcccggcgaagcctttcacggcgatctgggcatgatctcgaaagaggatgtcgtgctggcgctctcctattcgggcgagaccgacgaaatcctgaaaatcgtgcctttcatccactccaacggcaacaagctgatctcgatgaccggcaatcccgaatccgcgctggccaagaactccgacgtgcacctcgacgtgagcgtcgaagaggaagcctgcatcctgcacctcgcgccgacgacctcgaccacggcgcagatcgccatgggcgacgcgctggccgtgtcgctgatgcagatgcggggctttacgagcgtcgatttcgcacgcctgcatccgggcggaagcctcggacgccgcctgctgatgaccgtcggcaacgtgatgcgttcgcacgatcttccggtcgtggcgcccgattgctcggcgacggacatgatccacgccatcagcaagggcggactgggactcatcatcatctgcgacggcgaccgcatcgagggcatcgtgaccgacggcgacgtgcgccgcgccatggagcgccgccgcgccgagttcttcaacatcaaggccgccgatatcgctacgccgaatccgaagacgatctctgccgaccggaagctgatcgaagccgagaagatgatgacccgcaacaaggtcacctcgctgctcgtgaccgacgaagccggcaaactgcagggcgtgatccagatttacgacataaaactgtagcgggtgttcatcgtactgctgacttacaaactgccgcttgcggaggtcgaacggcacctcgcggcgcaccgcgaatacctcgaccgtcagtatgccgcagggacgtttctctgttcggggccgcagaatccccggacgggcggcgtcattctctgccgcgccgcggaccgtgctgcggtcgagaccctgacggcggaggacccgttccgcatccacggcgtcgccgattacgagatcatcgaattctcgcccgtcaaacgcctgcccggattcgaagctttcctttgatttaaccgtttgcttaacccgaccgatatgaaatccttcctcttctctcttgccgcgctggccttgtgcggagcctgttcgcaaaataccggggttacctcccccgacggcacgatccgtctggcgttcgccgtagactccgccggacgcatgacctattcggttacggacggcggtgtccggctgttcgaaccctcccgactgggattcgaagccgccgaggccgatctcggcggtggtttcgccgtcgagcatgtgtcgcgcacgagcgtcgatgagacgtggacccagccgtggggcgagaacaaggagaaccgcagccgttacaatgaaatggctgtgcggctgcgcaacggcggcggcgtgcggctgacgctgcgcttcaggctcttcgacgacgggctgggattccgctacgaatatgaagcgtccggggcggattcgctccgcgtgacggacgaactgaccgaattccgtttcgccgccgacggcgattcgtggaccattcccgccagcttcgacacctacgaactgctttaccgcaaacttccgctgagcgaactggccgacgccaatacccccgcgacgttcaaggtcggcggcctctacggcagtatccacgaagcggccttgtacgactttcccgaaatgacgcttcgcaagacgtacggacttgcgttcaaatcggatctcgcgcctttgcccgacggcacgaaagcgcatgtcggcaataaatttacgaccgcgtggcgcaccgtgcagctggcgcccgatgccgtggggctgatcaattcgtcgctgattctcaatctgaacgaaccttcgaagatcggggatacgagctggatccgtccgatgaagtacgtcggcgtgtggtggggcatgcacctcggcgtcgagacgtgggcgatggacgaccgccacggcgcgacgaccgaaaacgccaaacgccatatcgacttcgcggcggccaacaatattcagggagtgctgttcgagggctggaacgaaggctgggagaactggggcggcagccagtcgttcgacttcacgaagccctatgccgacttcgacatcgcagagatcgtgcgttacgcccgcgaacgcgggatcgagatcatcggccatcacgaaacgggcggcaacattcccgattacgaacgccagctggagcgcgccgtcaaatggtacgccgatttgggaatacacaacctcaaaacgggctatgccggcggtatctccggcggcaacaaccatcacgggcagtacatggtgcgccattaccagcacgtggtcgagacggccgcgaaataccggatgacggtcaatgcgcacgaaccgatcaaggactgcggcatccgtcgcacgtggcccaacatgatgtcgcgcgaaggtgcgcgcggcaaggagtgggatgcttggagcgcgggcaatccgccgtcgcacgaagtgacgctgccttttacgcgcctgctcgccgggccgatggacttcacgcccggcacgttcgacattctctatgaaaatacgcgcaactcgccgcgccgcaaactctggaactgcggtcctgaggtcgatatgcgcgtgaatacgacccttgccaagcagatcgccgagtgggtgatcatctattcgcccgtgcagatggcttcggacctgatcgaaaattacgaggggcatcccgctttccggttcttccgcgacttcgatgcggactgcgactggtcgcgcgcgctggcgggcgaaccgggcgaattcgtcgccgtggtgcgccgcgcgggggagaattattttctgggtgcggcgaccgacgaacagccccgcacgctgtcgctgccgctcgacttcctgaaacccggcacgaaataccgcgcgacgatctacgccgacggtcccgatgccgattggaagacgaatcccacttcctataccatttcggaacgcgaggtttcatccgccgatacgctcgaagtggcgatggctccgggcggcgggcaggccgtgagcttcatgcccgctatatagcggcgcaagtcgtcgggaactctcggccccgaagccctcagccccggatgtaatgcggcatctcggcgggtatttccatcgaaatctccaccagaccgcctaccttgtccccggtccgccaagccgtctgatagatcatcttgcggactccctgtttctcgatggtgtaggcgttcgaaccgccctcggccgtcaggcggcggatgatttcgcgcgaacgttcgttgtggcagccgaaaagattgctgccgatcagattgccgtgccggatataggtcgcacgggctttctcgttcatgtaaaggatcacgccttcggtgtcgcagaccgtgacggcgcagttcatgccgtcggcccaagggaaaggattttctgtcgtcatggctgttcgttttgtgtcggtgggaagagagcccctctccttgcggaaagaggacggctgcatctgcgcgggccgagggtcactgctgtatcttgaccagctgttcgcggtaggcgttcaggatgcgggatttggagatgaagcccatgtagcggttctgtttgtccacgacgggcagcatccacgtatgtttgtcctcgaacttctggacgacgctctggatggcttcatgctccagaatcttgtcgggcggctgaatcatgtagtccgaaatcggatggccgtatttctcgcgtttgaacatgtcttcgcgcaggtcgtccagctggatgatgccgagcagatgcccgaagttgtcgatcacggggaagatgttgcggcgcgccgtcgaaatgatgtgtacgatgtcgcccagcgtgaagttctccctgatgcgcaggaaatcggtctccatcagttcgtcgagtttcaggaagacgaagaccgactggtccttgtcgtgggtcagcagctccccgcgcaggcgcagctgcttggtgtagatcgaatccggatcgaggtagtagtccacggcgaacgagatgcaggcggtgatcatcagcggaatgaacagcccgtaaccgttcgagagttcggcgatcaggaagatcgaagtcagcggcgccttcatcacgcccgacatgacgcccgccatgccgaccagcgtgaacgagacgatcgacacgtcccagtcgaagaaggcgctgcacagcagggctatcgacgcgcccgtgaatgcgcccacgaacagcgacggggcgaatgttccgcccacgccgcccgcggcgttggtcgaagccatggcgatgaccttgaagaacatcgtggcgatgacgaagagtatgacaacccagtcgatgtcgctgaaacggtagaagagcgaattgtcgaagagtttttctgcctgtccgtgcatcagcgaggtgaatccttcgtaaccctcgccgtagagcggcgggaaaatgaagatcaggactccgagcacggtgcccccgacgatccacttcttgtactgcttgtcgatcttcttgaaaagcgtgctcacgcgcaggttcgtcgaggtgaaataccacgacatcagtccgcagcatacgcccagcaggatgaagagcggtatctgccagagttcgaacgcatctgcgggtgccagcgtcacggccagaatcgggtcgaagccccgcagcatgaaggccatcgtcgtggccgtgatcgaggcgatgagcagcggaatgaccgatcctgcggtgatgtcgagcatcaggatttccagcacgaacaccacgcccgtgatcggagccttgaaaatggcggccagcgccgcgccggcgccgcagcagagcagcagcgtggtgtgcttgtagttgagccgcgcgatccgtccgacattcgagccgatggcggctcccgtcagcacgatgggagcctcaggtcccaccgaaccgccgaatccgatggtcgtggcgccgccgacgatcgaggtccagcagttgtggcccgcgatgcgcgaattgcggctcgacatggcgtagagcacgcgcgtgacgccctccgaaatattgtcccggacgatgtatttgacgaacagcgtcgccagaatgatgccgacggcggggtagatcaggaacaggatgtgggcgctgtccaccggaaaccagttggtcagtccgtatttgatgccgtacagcagcatctcgaacagataggtgcccactccggcgagcacgccgacgaccacggccagaagcatcatgatctggctgttgctcagccgcctcgtgaggcggaggaacgtgcggtagatgtggtcggcgcgtaagttcaaatccgtcgtggttttattgctgttgcggttttattccttgtgtgcgaaatgttcggcctgacttgcgatcagctccttgtcgtcgaagtagtcgatcttcatggcgcgtttcacgtcggcgagcgttgcggcggcgacttcgcgggccgcttccgaccccgcgcggaggatttcgtacacctcgccgatgcgtccctcgtaatatttgcggcgttcgcggaacggctccagcatctcgttcagcaccgcgatcaggaacttcttgaccttcacgtcgcccaagcctccgcggcggtagtgggctttcagctcctccagcgaagggtagtcgggcaggtatttcgggaagtgttcgggacggctgaaggcgtcgaggtaggtgaataccatgttgccctccaccttgcccggatcctccacgcgcaggtggtcgggatcggtgtacatgcccatgaccttcttcttgatctcatcggcgctgtccgacaggtagatgcagttgcagagcgacttcgacatcttggctttgccgtcggttcccggcagccgcatgcagaccgcgttttcgggcagcagaatctccggttcgaccagcgcggggccgtataccgtgttgaatttgtggacgatttcgcgcgtctgctcgatcatcggctcctgatcctcgcctgcgggtacggtcgtggctttgaaagccgtgatgtccgccgcctgactgatcgggtatgtgaagaatccgacgggaatgccctgacgctgctgggtgtcgccctccgtgttgttctcggcaaagccgcgcagctggatttcggccttcacggtcgggttgcgctgcaggcgctgtaccgtgacgaggttcatatagtagaacgccagttcgcacagttcgggaatctgcgactggatgaaaagcgtcgatttgttcgggtcgagaccgaccgaaaggtagtcgagggcgacttcgatgatgttctggcgcactttttcggggttgtcggcgttgtcggtcagcgcctgcgcgtcggcgatcatgatgaagatgcgttcaaattcgcccgactcctgcagttcgacgcggcggcgcagcgaacccacgtagtgtcccagatgaagccggcccgtcggacggtcgccggtaagaatgatttttcccataaaacgattaatcctccgcttgacgaatttaagttacgtatggtttcggggcagctccagagatgcggaattcgccaagctcgcattacggcatcctcgatgccggttccacatccggaatcctgcccaaactccctttctgccgggagttccggcttccccgcggcactgaaactgcggtgaaaatcagtgccggctctcgttttttcggtattttgtggacaaacatacgaaaaagcgcgcgagcgacctaataaagttgttgtttatagattttttttatatttttgctcgtcggaataattgtctactatgactataattcagcttgaatacctgttggccgtagccaactgcggcagtttttcgctggccgccgaacattgtttcgtgacccagccctcgctgagcatgcaggtcaaagccctcgaagaggagctgggcgtggtgctgctcgaccgttcgaagaagcccgtgatcccgaccgaagcgggcgacgtggtgctggagcgtgcccgcgaaacgctgcgggcctataacaacatccgcgaatcggtggccgaactcaagggcgagacgtcgggtaaactccggctgggcgtcatcccgaccattgccccgtacctgctgcacaaattcatcctcgctttcgtgcgcgattatcccaaagtcgaactggagatctccgagatgatcacttccgacatcgtcgaggccctcaagcgcgaccgtatcgacgcggcgctggtggccagcggcacctgcggcgaggggattctggagcaggaactcttcaacgaccgtttcttcgcatacgtttcgcccgaaaacgccctttatgagcgctcaaacatccgcatcgaggacatcgacctgcgcgatctggtgattctgagcgcaggaaactgtatgcgcgaccagatcatcgaactctgtcaggccaagcgcgacatgccgtcgcactactcgttcgaatcgggttcgctcgatacgctcatgcgcatcgtggactgcacgtcgtgtcttacgatcattcccgaaatggctgtcgaatacattcccgcggatcaccgcgaccggctgaagatgctggccaaaggcgccacgtcgcgcaagatcgcggtcgccgtgcgccggacctatgtcaaaagttcgatcatcaaggccctgaccgatacgattatggccaatgccccggaggtcgggaactgacgtgcttttcacgaaatgaatgcgcccggcggttttttctgccgggcgcgttttgtttttcggatcctgttttttcgttccggtctgtggcgcgttgctgctccggtctgtggcgcgccgctgttccgccctatgccgcgtcgtcatcctcggtctgcatcggtcgccgtccccgtttgtgccgtgtcgccgctctcgccttgtgccgtgccgctgttccgccctgtgccgtgtcgtcatcctcggcctgcatcggtcgccgtccccgtttgtgccctgtcgccgctccgatttgcgtcgcattgtcatccgctgtctgcgtcgtgtcgccgttccggtttgcggatggccgccgccggagaattctgcggacggtttggcggggaatctgtgcgggctgcggggctcttgcggcctttccctgcgttgcggcgattccggtcgggtcgcccgcccgcttttttgtagctcttaattttcaaatctcattctattttcgtacctttgcaaggttatagacacctattgaagatttatggataaactgatcgaaactatcgtaagtgcgattgaagataaaaagggtaaggatattgtatcgttggacctctcaggtttcgacggagccatatgctcccggttcatcgtgtgcaacgccgattccacgacgcaggtctgcgccattgccgcaagcatcgaagagaaggtgctcgaaacgctgggcgagaaggtctggcgcatcgaaggccagcagaacggcgtatgggtcgccatggactacgtggacgtcgtggtgcatattttccagaccgaactgcgcagtttctacaaactcgaagagttgtgggccgacgcacccatgaccaaatacgaatacgaagagtaattttttagtatggcacaacaacgcaaaaacaataataggatgaatatgaacatgccgaggccctcgatgctgtggatctacggtctgatcggcgcgttcatcatcggctggtacgtattcggcgatgtcaacgacacgccgctgcccagcgactggacgacggtccgggagatggtcgaaaagggcgacgtggagaaaattcaggttgtgaaccgcgatcaggcgcaggtttttctgaagaaggaagctgccgaacagtaccgcagggatacggtggacaaacgtttcaagcggctgcccgaaacgggcgtgcagctcacctttacgatcggatcggtcgattcgtttcgcgaagatttgaagaacgccgagcagcagtcgggacagaccgtgccggtggtctatgagaacaaagccaacgactggaccaacgtacttgtcaacctgctgccgtgggtgttgattatcggcgtttggattttcatcatgcgctcgatgtcgcgcggcgccggaggcggtgcgggcggcggcatcatgaatgtcggtaaagccaaggcgcaggtcttcgacaaggacgcttccaagcgtgtgacgttcaaggatgtggccggactggaggaagccaaggtcgagatcatggagatcgtcgatttcctcaagaagtcggaaaagtacaaggaactgggcgccaagattcccaagggcgccctgctggtaggccctccgggaacgggcaagacgctgctggccaaagccgtggccggcgaagccaacgtgccgttcctttcgatttcgggttccgatttcgtggagatgttcgtgggtgtgggcgcatcgcgtgtccgtgacctgttcgagcaggccaagcagaaggctccctgcatcgtcttcatcgacgagatcgacgccattggccgcgcccgcggcaagaacgccggattttcgggcaacgacgaacgtgaaaatacgctgaatcagctcctcacggagatggacggcttccagaccaatacgggcgttatcgtcctcgcggcgaccaaccgcgccgacattctcgacaaggcgctgatgcgcgccgggcgtttcgaccgtcagatcgaggtgggcctgcccgacgtcaaggagcgcgaggcgattttcaacgtccatctgcgtccgctgaaactcgatccgcagctcgaccgtgagttcttggcgcgccagacgcccggtttttcgggcgccgacatcgccaacgtctgcaacgaagcggcgctgatcgccgcgcggcacaacaagaaattcgtgtcgaaggaggatttcctcgcggccatcgaccgcatcgtgggaggtctcgaaaaacccaatatgccgatgacggccgccgagcggcgcgccacggcgattcacgaagcggggcacgctaccgtcatgtggtcgcttccccaatgcgatcccgtgctgaaggtcacggtggttccgcgcgggcggagtctgggcgcgacgtggtatgtgcccgacgaacgccgcatccacgttaccaacgaagccctgcaggaacggctggccgggttgctgggcggccggatcgccgaggaggtcaactacggaacgctgggcgcaggcgcgctgagcgatctggagcgggcgaccgagacggcctatgcgatggtggcctattacggcatgagcaagaagatcggcccgatcagttattacgactcgtcgggcacgcgcgatacgtttaccaagcctttcagcgagcagacggcccgcgacatcgatacggaggtgcgccgcatcatcgaagaggcgtatgccaaggcgcgtggcatcatcgaacggaaaagcgaacagatcaaccggatggcggacctgctgctggagaaggagacgatctatgccgaggatatcgaacgcatactcggcccggcggcgcaggtgccgcgggaggatgacgacccgaaaaagggtgtcgtcgtcgccgacgacgatgccgcgtccggaacggcggctgcgccgccggacgctccgccggccgggaccggaacgacgcaggaaggcgatgccggaagtgcgtcgggaacgaaaaccgccgcttcgggagccgcgaacgccgaaaaatccgaactcaagtaaccgacgaacctaacccgctgatatatctgatgagtgaaaaaatgaagaacctcatggtgcgtacactgagcggcgcagtcctcgcagtggtggtgctgggggccgtaatctggtcgcagtggagtttcggcgcactgttgctggcgatgcttgtcgccggcatgctggaattttacgggctggccgaaaagcagggcaatgccccgcaaaaaatcgtgggaatggcggcaggcatcgtgcttttcgcgcttaatttcgcgttcgtgtcggacgacatcgaaattctgggcggcgccagtcaggcttttgcctgcggaatggcgtttatgctcctgctgatacccgcgatgttcatctgcgaactttaccgcaaacagcagaatccggcttccggaatcggcacgacgctgatgggcgtctgctacatagcattgcccctttcgctgatgtgttatattccgatcatcggaagcgaggtgtggactccgtgggtgatgattttctacatcttcatcatctgggccaacgacgtcttcgcctatctggtgggaatgtccgtcggacggcaccgcatgttcgagcgtctttcgcccaaaaagtcgtgggagggattcttcggcgggctggccggcgccgtggcgatgggctatgccgccgcgcgggtattggatgccgatgtatgggcgtggctcggtctggcgctggtggcggccgcaacgggcgtgctgggcgatctggtggagtcgatgttcaaacgcgccgcgggcgtcaaggattcgggaaatctgatccccggacacggcggtgtgctggaccgcttcgacgccttgctgctctcggcgccgttcgtcttcgtctatatgctttttgttatgtaactgcaatcctaaattaagttatgagaataaataaagaaggctacaaaattatcggcatttccggcgccgtttgcgtatttttgtggtggttgatctatcacctgctggtcagcgacgcgaatatttcgctgttgtgggtgagcgccgtgctgttgctgctgttctggttctttatcgtcgcgtttttccgggaaccccgccgcgtgcgcatccacgatgccgacctcgccttttcgccctgcgacggccgcgtcgtcgtgaccgaagtcgtgaaggaaaacgagtatctgaatgaggagatgctccagatttcgatcttcatgtccgtcaccaacgtccatatgaactgggttcccgtgggcggtaccgtcgaatatttcaaataccatccgggccgttttctggtggcgtggcatcccaagtcctcgaccgaaaacgaacgcaccacgaccgtggtgaagatggcttcgggacagaaggttctcttccgtcagatcgcaggcctgatcgcgcgccgtatcatctcctatatgaaagtgggttcgcctgtggagcagaacagcgtctgcggcttcattaaattcgggtcgcgcgtcgatgtgctcgttccgaagaacagcgaactgctggtcgagatcggcgatcctgtggtgggttcgcagactccgatcgcacgccttccgaaagcttaattcatccgatgtatgagggcgacaccccagaccttcctgcggtttattgcgggcgcggcggttgctgcggccgtcctctttctggtctggtacttccggtcgatcgtcgtctatgtgctgatctcggccgtgctggccgtcatgggcaatccgctggtcaaacggctcgcggcattgcatatcaagggctggaaagtgccccgctggctggcggcgctggcgacgctgatcgtcatctgggtggtgctggcgacattgtgttcgctgttcgtgccgctggtcttcaataagatctaccagttgtcgaacgtcgatttcgccaccgtcgtggcgagcatcgaagaaccgatagcccgcgcccaaagctacctgcacgaattcttcgccatgcccgaaagcaccttctcgctctcggaggccctcgcgtcggcgctcaagcaggtgatcgacatcgagtcgctcaacacggtctttgcgtcgatcgtcaatgtcgtgctctcctccgtgatcgctattttctccatcaccttcatcaccttcttcttcctgcgggacgaggggcttttctatgctatgattacggcgatgttccccgaacgttatcacgagaacatcacccgtgcgctcgactccgtaaccctcttgctggcgcgctattttacgggaatcctctccgaaagcctgctgttgatggtcgccgtgtcgctgacgatgatggccttcgggatgaaagccgccgacgcggcgttcatcgggctggtcatgggcgtgatgaacgtggtgccctatgccgggccgcttatcggcggcgtggtttcggtcttcgtgggcatcgtgaccccgatcgggggcatgaccgtggggcatacggccgtcgtcatcatcggttcgctgctgatcctcaaggggctcgacgacttcgtgctgcagccgacgctctattcgtcgcgcgtcaaggcgcatccgctggagatcttcctcgtgattctgatcgccgggtcgctggccggaatcctcggcatgctgctggcgattccctcctataccgtactgcgcgtcttcgccaaggagttcttctcgcagttcagtctggtgcgtaaactgaccgaaaaaatctgatggaaaaggtgattatcgagggcgttgtggaacacggacgccggctcggacgcgagctcggatttccgacggcgaacgtggccgttcccgattccgtcgccgcggaggacggcgtttaccgttcgcgcgccgaggtggacggagcggtttacgacgcgatgtcgaacctcggccgcaatccttcggtcggcgggacggcgcggcgtctcgaaacgcatattttcggcttccgcggggcgttgtacggccgtatgctgcgcgtggaactgctcgaaaagatccgcgacgagcggcggttcgatacgctggaggagctgcgggcgcagatcgaaaaagacaaggaatatattttgaaattaaaataaacagttatgtatttagacttgacaatgccctacaaggtagccgacatgtcgctggccgggtggggacgcaaagagatcgagatcgccgagcacgaaatgcccggactgatggccgtgcgccgcaagtacggtccgcagaagccgctgaaaggcgtgcgcgtcatgggttcgctgcatatgaccatccagaccgccgtgctgatcgagaccctcgtggaactgggcgccgacgtgcgctggtgttcgtgcaacatcttctcgacgcaggaccatgccgccgccgcgattgccgagacgggcgttcccgttttcgcatggaagggcgagacgctgcccgaatactggtggtgtacggccatggcgctgtcgtttccgggcggcaaaggcccgcagctgatcgtggacgacggcggcgatgcgacgcttctgattcacaagggcttcaaagccgaggacgacgcttcgacgctcgattacgaaccctcctcctatgaagaggaggtgattatcgacacgctgaagaaggtgcttgccgaggacaaggataaatggcaccgcacggtggccgaatggaagggcgtcagcgaggagaccactacgggcgtacaccggctctaccagatgcaggaagcgggcgaactgctcgttccggccatcaacgtcaatgactcctgcaccaagtcgaaattcgacaacctctacggctgccgcgagtcgctggccgacggcatcaagcgtgcgaccgacgtgatgatcgccggcaaggtggtggtcgtgtgcggctacggcgacgtgggcaaggggtgcgccgcttcgatgcgttcgtacggagcgcgcgttatcgtgaccgagatcgacccgatctgcgccctgcaggcggcgatggagggcttcgaggtgaagaccgtcgaaagcgctctcggcgaaggcaatatcttcgtgacctgcacgggcaactgcgacatcatcacgctggagcatatggagcggatgcgcgatcaggcgatcgtctgcaacatcggccacttcgacaacgagatacagatggcgcggctcgaaaagtcgggcgccgtgaagaccaatatcaagccgcaggtcgataagttcaccttccccgacggacattcgattttcgtgctggccgaaggccgtctcgtgaacctcggctgcgctacgggccatccctcgttcgtgatgtcgaactccttcacgaaccagtgtctggcgcagatggaactctggcaggagaagctcgaagtgggcgtttaccgtctgcccaagcatctcgacgaagaggtggcgcgcctgcatctggacaatctgggcgtggagctgacccgcctgaccgaaaaacaggcggattatatcggcgtgagtcccgacggtccctacaaggcggagcattaccgctattgagaccggcggcatccggcatggaaaaagaggatacccgtgaatgaagtgcaccccaaatattggacggattagtatttgtttagatggcatgagttcggtattgtaccgggctcatgttgtttaagtatttctttatccgcttgttattgtagtagtcgatatattcttccaattcttttcggaaatggtctatggatgagaatttttgcaaatataataattcggacttcaataatccaaagaaactttccatagcagcgttatccagacagttacccttgcgcgacatgctctgtgtaatacctttctgtcttaaacggagctgatactgcttcatctgatactgccagccctggtcggaatgcaagacaatacccggagaatccggtattctggcaaacgcatcgtccagcatcttcatgatctgcataaagttagggcgttcagctattttatagctaataatctcccggttatataagtccataatcggcgatagatataactttacgccgcaaaccgaaaattccgtaaggtcagtaacccacttctgattcggtttttcggctgcaaagtcgcgttgcagaagattgggcgctatccgtccgatctgtcctttgtatgaacagtatttacggagcctgacctgactttttatcccgcaaatattcatcagcttaagtacggttttgtgatttatcgcatatccgatcttattcatttcaacggtaatgcgccgataaccataacgccccttatgttcgtgatataaccttataatactctctttttcgcgagcatatttatcgggttgttttgattttctgaagtgataataaaatgtgcttcgcgccatccctgcggctttgagcaatactgaaagccggcactgcggccttagtccttcgatggcttgggctctttcccgctctcgcggacaatgcgctcctcgactaaggcctgcaatttttttaagtaagcattctcggcacgaagatactccagttccttaagcaactcttcgtgcggagtcgttttgagtttgacttttttagtcttcgatttactcatggccggcctccttctttgcggtttacgccgcaggccttcagcaccttggttttgatagagccgctcccattgacgaataacaaaagggcccggaatgccgaaatgcactgctgtctccagcaaagatagatgattttggtgcatatgcttcaaaactgacaacttaaattctgcactgtagctaccgtggcgcagcttaaggccggcaaggccatggcgctcgaataatgttacccacaagtgaacttgcgagcggccacagcccaagtgacatccggcttccctaaccgaaagtccgccttcgagtaccagttttacggcctttaaacgaatctcataattatatttcataaaaaacaccccaaaagtgtccaacttttggggtgcagtacagaaggtatcctcttttcgttttcaaccgttccgcagatcagcggcggcggggaagggcctgcggatgtgcgagtcggttggctgctgcgaccgcagccttatatgccgaaggtgcctgctggggcgttacggcgggtatctccgcgggcagggtcaccgtgtagcaggccgggacgccgggaacgccgtcggcatcgtaggccatgtagatcacttcgaaggtttcgtttgccatcgaaacgtcccagaacgtgacgtcgtagtaatagaatccgtcggcgctcacttccagatccatgctgcttttccagccggagtagtagccgtcgtagtcttcgccgtaggcattggcgagcgacgagaaatactggcgccagtaggatgtctcctttttggcgaaatcgcccttgtagtagccgtcctcgtagcggaatgcgcgggcgccggcggtcggttcgaaacggtataccgttgcgaagcagttttcgggggcgccttcgagttcggaggagttgaccaccacgtgctggatgcgcagcgcggcctcgctctggccctgatcgcccgacgacgagcgtgccggagtcttgagtttggcccagttgagcttgccgaaattgccgtcggcatcgacgccgactacggcgaggatgtactcggtggagtatccccaagacgattcggtcagcgtgttgttggagatgggtttttgggcactcagatacccgatcatgtcctcttcggtgttaggctcgaaatcgggatcgtccgggtcgtcgtcgaaatagctgccgtatacgcacgtggcgtaataggcgacggtcttgtcgttgggggtaaacgtagccgtgatgcggcagtaatagctggtgcgttcttcgtagttgacttcgaacgtcacccacggacctgagagatattctggttcgtcggtcgttaccgggcattcgcaccactccgagtcgagcgtcttttcgccgtcgcctagcgccttgatgcggaaagtgtaggctgtcgatgctttcaggtcggtgaaagctgccgagagcgcatcggtgttggtttcgggaacgatcaccgtgattgcgccgtggggattcttatgctgcagggtataggtgtacgatacggctccttcgaccgcttcccatgagattgcaaaggagtcggaggtgatgtccgatgcaaccggggccggcggcatcacggcttccggttccggaacggtcggatcatcgtcggagcaggaaatccccccccctgccaaaatgaaaagcagcagatacggtaataattttttcataacgtgtgggataaaagagttgaagatttttgatgaataaaaaaaattgcgaaacgaatttactggttttctccgaaaattccaatacccgttcgccctccgcggaagtcgtccgaaaacggattgtaactgtaatattcggtttgttttataatttttttcttttcctgcggatggaatttgcagggttttttcgaaccggggcctgaaaattacgattcgtaattttaattttttttcggatttttttcgaccgggtgcgcaaatgaaagcgggacttgcgcactgccgttatcggtctgccggggcggaattatccgcagacttcatccgtcagccgtgcgcagatactcctgtttgcgggccgttttttcggacggctgttaaatattgtctcctctgtttttccgatcgattgctttttgccgtgaaaatacttatctttgaacgggtttaccgattctgcaagctgtttctatccgtatatgatcatataatattgtcggcagagacttggtgttgcgccgtcatgtatccgaccctacttttgtttaacttaaataaattgctatgaaattttttacgatgcggagactggccgcctgcgtggctgccctgctccttgtttccccccccctgctgacgggttgcgacgactatgacgactcggaactgtggcagaatgtgaacgacctgaagagccggatcgaggctctcgaaaccaagatcggccagatgaacaccgagattgcggccctccagaaaatcgtggacgatgcggtgaccgtcgtcaaggtcgaaaagggcgccgacggctatgtcatctatttttcggacaacacgacggccgagatcaagaacggcacggccggagccgacgcacccgttatcggcgtcaagcaggatacggacgaggtctactattggacgatcacgaccgacggcaaaaccgagtggctgatggccggcggcgcgaaactgcgcgtgacgggcgaaagcgtcaagcccgtgatgtcggtcgatgacgagggctactggacgatcagctacgacggcggcaagacctccgagcggattctcgatgccgcgggcgatcccgtttccgccgtgaccgagggcagcagcatcggttcgctgttcaagagcgtcaattacgacgacaacaatgtctatttcgaactgagcgacggttcgatcgtgacggtgcccgtgcgcagcaatttctacatgctgatccgcaaggcgcccgaagtcgcgactttcgttttcggcgagaccaaggtctgggacgtcgagtccgccggggtgacgaaaacccttgtttcgaagcccgacgagtggaaggtgacctatgccgacggcaagctgacggtcacggccccgaccgaagcgcataaggagtgcgccgatctgcggggtacggtgggcatcacctacttcagcgccaacggtcaggccgacgccgtgatgatggacgtcgtggccgacgccgactacaggggcgagaccgtgggtgaagatttcacggtcaatatcacggagatcaccgataagattgttacgatggccgttaccccgaagaataccgagacatattggtatgtaggatatggtacgaaagaggaaatcgacgctaaagggactgattatctggtcaaagcccctaacggttacctttcgatgctgggattctatgccaccatgggctggctcgacaattatgccagcaaggggatgaaatcggacctttcgttaagtatcgggttgcaacccgctacggaatattatgccgtgatatttggctttgaagccaatgccgccacttccagcagcacccttaccacaggtgtgatgacggttcctttcaagactcaggagccggtcgtaatcaataccgtttaccgcatcgacgtctccgacgtgtcgtggtacggcgccaagtacgtctgcgttccgtcggacgatctggggtacctccacggttttatccgcaagtcggaattcgacacttatgacgatgacgccgcctttatgacgtcgcgtatcgagatttacaagaaggcctacaaagacgaactggagagcggcgcgctgacatgggccgatctgaccttcaccgaaacgcagactgtcgtggctccggcctatatcgaagaggcaggcgctacgcgcatgggactggtcgatgatacggagtactatgtctatgccttctcctgcaccgacggcaatgccacctcgccgttgtcgaaggcagccttcaagaccggaaaattcaccccttccgaggagtgtacgttcgaaatcaccaccacggtcgagcgtcaggacgtaacggtgaacgtcgtgccgtcgaacaggaacgtcacttattatttcagcgtcaccagagccgcgcagcaggagcagttcgacgccgacctgcagtttgccgtggacgacctgatctggaccaagatatgggccgagtcgcagcagatcacgctctccagcatgctttcgaagggtgaggacagcaacaagtggaccgacctttgggccgcgacggcttatatcgtttgcgcctacggcgtttcggaggacgggacgatcacgacgcgtccgaccctcgcccgcttcgtgacgaaggggacgattgaccagacgagcgtgaaaaacgccgccgcgagcgccatgggcggcaaggtcttccgccgttagccgttccggacatactgaaaacgggaacgccgcaggagatttcctgcggcgttcttcgtttctgcggattccggcgcgtcaatagccgaaaatctcctcctgcgatacggtctgaatgggaccgagggttttcaggtagttgagatcgaggtcctgaatgtcgcccagaatgccgtagacgtatttgcggcctttgacccacttctgctgggcggctttcacgtcgtcgagcgtcatggactggaccttctcgaaaatctgcttgtcgcggggtgcgtcgaggcccagatcgcgggcgcggagatagctccacaatacgccgtctttgaccgtgcgctcggtacgcaggcgcgagacgagggcttccttggcgatgccgaacgccttttccgattcgggcatgttgttgatgatgtcgtcgaacgcttcggcggctttttgcatcttgtcgttctgcgtggcgatgaaggcgtagtagctgtaatcgccgttggcgttgctcggcgtagcgagggtggcccatgccgtgtacgccagaccgcgcgcctcgcgcatctcttggaagacgatggtgttcatgccgccgccgaaatattcgttgtagagcgtgatttcgggatcggctgccacgtcgaatttctcgccgcggttcgagaactgcaggtagtagagctgtttggcgtcgtactgagccagtacgaccttgttcgcgtcggtgggcagcagggcgctgaacttcttctccagcggctgcaggtcggcggcgaccttgtggtgtttcgccagcgcactcttgacttcggcctctttctgcgggccgtagtagagcacttcgtgctgtttgcccgtcaggtcgccgattttggcgagcagctgctccgaggtcagcgcctgcagcgccgggtcggtgagggtcgtgcggcggatgaagtcgccgccgtagaacagatagcgctggagcgcgccgaaacagcggctctgattgagcttcgcatccgcacggctcttgagcatgtcggccttgcaattctccagaatcgcttcgtcgggtttggctccggcgatcagcccttcgacgatctccatggctttgcccatgttttcgctcagtccggtgatctggatcgaactctggttggccccggcgttcatgtagaacgagcaggcgatgtcgtacatctccgatgcgatctcttcggcggtcatcttgtcggtccccagatagctcaggtagttgaatgccagattcaacgccggatcgttctccgtaccggtgttgaagacgtagatcagcgtgaagatatcgttggtctcgttcttcttgtagagaacgtcgatgccgggctgcgcctcgaactgcgacatgtctttcttgtaatcgacgaatacgggttcgatcggctgcacctgcgaggtctgtatctcggagaggaattcgctctgcgagtcgcggttggtcacgatcggggtgatcttcggtgctgcgatcttctgctcgtcggggtctttgccctcgcgtttgtagatgatggcgtaactttcgggaccgaggtatttgttggcccactccacgacgtcctgcttggtgatcttcgacatgcggtcgagccgtgcgacctcgtcggcccagtctgcgccgctgatgaacgaatagacatagagtatcgcgcggctgtcgttctcctcgaacgagcgcatcagctgcattttgtagttgttgatggtcgcttcaatcagtttttcatcgaagtccccctcccgcagttttgccacctcctccagaagcaggtcgcggacttcgtcgagcgactgccccgtcttggggcgtccggccacgaggaacgaactgtaatcgggctgcgtcgaggcatagccgtaggccgagagcaccttctgctgctggttcaggtcgaggtcgatcagtccggcctgtccgttgtagaggatcgaacccacgatgtcgctgatgtcggtcgatttgtcgttcgcgcccggcagacgccagcccagcatgacgttggccgcttcgagtccgtaaacctccttcaccacgggagtcgtgatcggcttttcgggttcgaactgcagttcgggcaggttgggattgggctgcatgtcgccgaagtacttctcgatcgtggcgaccatttcgtcgggttcgaaatcgcccgaaacgcatacggccatgttgttgggcacgtagtaggtcttgtggtagtttcggacgttggtgatcgacggatttttcagatgctcctgtgttcccagcacggtctgcgtgccgtaggggtggttggggaacagcgcggcgtccatcgcttcccagactttgcggctgtcctgcgtcagggacatgttcttctcctcgtaaatggtctcaagctcggtatggaagccgcggatcacgggattcttgaaacggtcggcttggattttggcccagttgtcgatctggttcgagggaatgtcctcgacgtagaccgtcatgtcctgcgacgtgaaggcgttggtgccgttggctccgatggccgacatcagcttgtcgtactcgttgggaatggcgattttcgaagcttcgtagctgatcgagtctatgcggcggtagatggccgcgcgctcggcctcgtcggcggtcttgcggtaaacctcgaagagactttcgatctcgtcgagcatcggtttctccgcggcgtagtccgaggtgccgaactgctgcgtgcctttgaacatcaggtgttcgaagtagtgcgccagacccgtggtctccgcggggtcgttcttgccgccgaccttcacggcgatataggtctggatgcggggcgcctccttgtttacgctcatgtagactttcagtccgttgtcgagcgtgtagatgcgggtgttcaacggatcgcccgccaccgtttcgtacttgtacttggaacaagccgcggccagcatcgctgcgatgactaccgcaaatagtagaaactttctcattatcgatagggttagaaaagagttgcgaaccagtcccggacggcggggtaggtgtcggccgtcacatggacgaacatgccgatcgccgccgcgagtttgatgcccgtgccgacgacgaacgagaggaacgagcctatgccgaccagaaacgccttgcccgcgtcgcggcggtcgttgagcagctcgccgagcacggcgccgaagaaggggccgaggatgatgccgacgggcggaaagaagaagaatccggcgaagacgccgaccgtggcgccgatggcgcccgaacgggagcctccgaagcggcgggtcatccacgccggcaggaaatagtcggcgacgctgaccgccacggtaatggccagccatagccagatggccgccggcgacatgctcgaataggaggtgaagtaggcgcagagaagtcctgcgtaactgagtactacgccgggcagggcggggacgatacagccgacgatgccgacgatcgagagcagaaatgctgcgacggagagtgctatgtccataatattcagcagtggaaaaaatatccgttatttaacaaaggtaagcatttatagcaaaaaatctccctgaaacgggagattttactttacttatgacggtttaccgccttgcaggacggtgaagccgttatttcacgagccggttcgtcgccgtgtcggggaatacgatccacggcttgaactgtttggcgtcttcgaaatccatcagcgcataggatgcgatgatgatgacgtcgccgacctgtaccttccgggccgcggcgccgttgaggcagatgcagccgcttccgcgttctcccttgatgacgtaggtctcgaaacgctctccgttgtcgatgtccataatctggaccttttcgccctcgatgatgttggccgcctccaaaagcgcctcgtcgatggtgatgctgcccacataatgcagatcggcctgcgtgaccgttacgcggtggatcttggatttgatgacttcaatctggaatttcattatcggatacggatgttgtcgattaaacgaatgtctcccgcctgcacggcgatacagccctgaatacgctcggcgtcgctccatgcggcgacttcctgcatcgtccgcgcatcgacggactggtagtagatgaccttcagcagcggattgcgctccacctcggccgtgacccacgccttcagcgcttcgggcgccagttcctgcgacttttcggcggcagcgcgcagggcggcgtagatctgcggggctgcggcgcggtgctccgcgtcgagcagcgcgttgcgcgacgagagggccagcccgtcttcgccgcggacgatctcgcattcgacgatctcgaccggaagcgacaactggtccaccatcgccttgacgacggcgatctgctggaaatctttttccccgaagtaggcgcgcgccgggcgtacgatgtcgaacagccggctgacgacctgcgccacgccgttgaagtgaccggggcgtgtggcgccctccatcaccttgtcgatctgtccgaagtcgaactgacggccgtccggttccgggtatatctcctcgaccgaaggcatcagcacgaaatccgcgccggcccgctccagcagacgcgcgtcggcctccggagtgcggggataatgtctcaggtcgtttttgtcgttgaattgggtgggattgacgaagacgctcaccacgacggtggcgttctcccggcgggcgcgctcgaccagcgagcggtgtcccgcatgcagggcgcccatcgtcgggacgaacccgattccggactgctccgcagtctccagctccgcgcggagctctttgacgcttgtgaatattttcatctcttctgaaacgaacttgcggggcaaaggtatgaattcccgcaaacataacgaagaaaaaacggaaaaaaagcgccggacactccggcggcggcctttccccggccggaaacgcttctgcggggcgttttgccgctttcggtcgggctgctgccgcgctgcggacaagccgttcgtgcgaaaagatgtggaattcgttgaatatatttcggggaatggcaaaaagcgactatatttacagatatttagacccaagcgggaatgcccgtcgcccgcatcggcagatgcgggagtccgggggcctccgtttccgcaatacactgataaccgctctctccggggccggagacgatttttaattgactatgaagaaaatcttactgtgtctgcttgcccttgcggccggtctgaccgctttcggacagaacgaaagctcgttcggcgttcgtgccggtctcaacgtggcgaatctccatctcagcgcagggggcctgagcgcgtcgctggactcgcgcgcctcctatcatgtgggctttgcctatcagcagcccgtgctgcgggtgcttcccctctatttcgaaacgggactttacctctccggacgcggggcgtcggtgacggcgggcgatctggatttagacgtggaaggaaaggccaaattcaatatgttatacctgcaggttccggctgtggtgagctggcacttcaatattaaaagcgtctcgatccagccagccgccggcgtctattacggtttcggcatccacggcaagctcaagggcgacgccgcgaaagtcgatctgttcaaggagatttcagtgcccgtcgaggacggctccgtcgaagggcaagtgttcaagcgttccgatttcggactgcgcttcggcgtaggggttaccgtcatgaagcattactatgcgggcgtcggctacgatctcggcctgctcaatatctccaaggattcgggcgagggtaagataaagaacggcagcttcttcatttcgctgggttacaacttttaaccccgctgcctgaatgaacggtgcgcatgtccttcgggatgtgcgcatctttcgtattgttttgtccgttttttgctatctttgccgaagcgaaaccccggcttggacggacggtgtcccggcagggccggtttgcggctctgcattcggcttgcgctgtccttgcacggcaggcgctttccggcggaatccggttccggccgtttgccgggagcgtgccgtttttggcgagaaattccaaacccgaacgatatgaaaaatttattgacgtttgcatctatgactgttaccgctctcgcactgacctcgtgcggcggggcttcccgaagcgaaaccccgtggatcgtcgaccgtttcgacgacatcaaggtcatccgttacgaagtccccggcttcgagcagcttccgctggaggagaaggagctgatctattatctggccgaagcgaccaagtgcggtcgcgacatcctgttcgaccagaatttcaaatacaacctcgccgtgcgccgcacgctcgaaacggtgtatgagaattacgagggcgaccgcacgacggccgagtggaaggcgttggagaaatacctgaaaaaggtctggttcgccaacggcatccatcaccactattcgaacgacaagttcgtgcccgaattcaccgaaggttacctgctcgacgtgatcgagaccattcccgaagagaagttcggcgagctgaacccgctgcgcggcgaggtctgcaaagccattttcgacgcttcgctctacaagacgcgcctgaaccagaccgccggcgaggacctgatcgccacttcgtcgaacaactattacgagggtgtgacgcaggccgaagtcgagaagttctacgccgacatggcggacccccacgatcccgaaccgatctcctacggcctgaattccaagctggtcaaagaggacggggtggtcagggagcgcgtctggaagataggcggcatgtattcgcccgccatcgagaagatcgtctactggctcgaaaaggcgcaggccgtggcggccgagccgcagaagagcaatatcgccgcgctcatcagctattacaagacgggcgatttgcgcgaattcgaccgctataacatcggctgggtgaaggataccgtgtcgaatgtcgatttcgtgaacggctttatcgaggattacggcgatccgctgggacgcaaggcgtcgtgggaaggcatcgtcgatttcatggacaaggaggcctgccaccgcaccgaggtcatttcggagaacgcgcagtggttcgaggaccattcgcccgtcgatccccgctatcgcaaggagaaggtgaagggcgtttcggccaaggtcattacggtggcgatgctcggcggcgactgctatcccgccacgccgatcggcatcaacctgcccaacgccgactggatccgcaaggaatacggctctaagtcggtgaccatcgacaacatcacctatgcctacgacatggccgcccatggcaacggcttcaacgaggagttcgtgctgcgtgccgacgaccgtgcggtgatggacaagtacggcaagctggccgacgacctgcataccgacctgcacgagtgtctgggccacggttcgggccagttggctccgggcgtcaagggcggcgagctgaaaagctacagctcgacgctcgaagagacgcgcgccgacctgttcggtctctactatctgggcgatcccaaaatggtcgagctggggctggtgccctcgttcgatgtggcgaaggccgggtatgcgaaatatatcctgaacggcatgatgacccagctggcgcgcatcgagccgggcaagaacgtcgaggagtcgcacatgcgcaaccgcaaactgatctgcgagtggtgctacgagcgcggcaaggccgacaacgtgatcgagatggtcagggagaacggcaagacctacgtcgtggtcaatgactacgagaagctgcgcggactgttcggcgacatgctccgcgagatacagcgcatcaagtccgaaggcgactacgaggcgggccgggcgcttgtcgagcggtatgccgtacaggtcgatcccgaactgcacaaggaggtgcgcgaccgctattatgcgctcagcatcgagccttacggcggtttcgtgaatcccgaattcaaactcgtggagaaggacggcaaaatcgtggacgtcaagatcagctatccggccgactacgtgaaacagatgctcggttattcgaaggattattcgttcctgcccaatatcaactgacggtaatctcctttacgaaaagatgcgccctgcgaggggcgcatcttttgtttttcagcgtgtcttcatcatcggttccgggcctcttcgctgccgccgatggcgaatgtcgaaacgatcaccatcttctcgtccacgttgttggggttcgagacgatgatgccgtattcgccttcgggctgctccccgaacgtcaggcggtaggagctttccccgtatttctcggccgagaaggggaggtattccatggtgttggattggacggcgaaggacccgacggccgaaatcaccgccgaacggttcttctttgtgcttttcatccggaagatgcgcacgatcgacatcgggtcggctttgttgtccttggcgcggacgatgagggcgaacggctctccggttttgaaccgtattccggccctgccgccttcgatgactatttttgtcttggatttgctggctgcgaatccggcaatgtatacgccgccgccggttcgcatctgaacgttgtgtttttcgagttttgcggacgatccgtcggaatatattccgacgacctcaccctcgaaatcgggttcgagggtttgtgccgttacggcgttacccccccccaagtcatggccgctacggccatcaggaataggatttttttcatcgttatataaatttggattgtaccgcgcaaaatgcacggcagacaaaaataataattttccgcaaactgcacaacagcctttcccgctttttgatgccgccgtatacgccgcgagacgcacccgtgggatgcgtctcgcacttttccggtctttaggatttactcctcgacctcttcgaactggtctttgcctacgccgcagacggggcagacccaatcgtcgggaatatcctcgaacgacgttccgggggcgatgcctccgtcgggatcgccgactgcgggatcgtaaatccattcgcatacgatgcaacggtactttttcatcttctctgtctttttaagtgaataaaaaatgtgttgatttcggtataatgcagttaattgcgtattctctccttttcgggccgtttttccggtccggcattccgtcgcttccgcaaatcggatgccgtcttatgtcgcctgcgtttctcaggtcgtctgcgtctcctttgcggtctgcgcttcctcccgttcctcctcccgttcctcctcctcttcttccgcagcttcttcggtcagccggttgccgcccggcggcatgagttcggcgatcagacaatccgcgtcggagcacgacacgtagagccgctcctcgtatatgtcggtgatctccacgaagttcttccactccgaagcgtacagacgtacgcgttcgaaccggcgcaggtccagaaaatggccgtagtaaccgaagaatccgcagccgccgaagagcggaaagaaccatttcatccgcttgggatcgacgcggcgtaccgaggcgatctccccgcgctttatctcggtgatgtccagcagacagcgcacctcgaccttttcgtccgtaaccatgatgtagcggggaatcgacagcgacatcagggcgatgagcgccacgatgaacgacgtgaaccaggccgagagataacctccctcgtagaggtggtacagcaggccgcccagcagtccgaagaccaccagatagatcagcgtccagtagatcgtgcggcggctgaagcggtatttatatattttctccatccgtttcgtgcgtttcttcgcggtcagccagcaatgcttcggcgatgaccgtatcttcgggagtcgtgatcttcaggttcgcccgttcgccttcgcagagaaatacagcttccccggacagttcgactaccgaagcgtcgtcggtgaattcgggccggtattccgtttcgtaggcgcggcgcagcagctcggcgcggaatacctgcggcgtctggacgatgcgcaggcggcggcggtcgatgatctgcgaagccgcgccgtccgtttcgcggaacgaatccacaggctcgacgaccggaatcgccgtgccgtgttccgcggcggccgcgaccgtgcgccggatcagctcctgcgaccccagcggccgcacgccgtcctgcacggcgatcagctccggatcgcgtttcagggccgccaatccgtttttcaccgagtggaaccgctcccgtcccccttcggcgaccgtgtgcggcgccacttcgaaacgcgccgacagattgtaccagaagccggtgtgttcggcgggcagtacgacgacgatttccgctccgggaagcgccgcggcgaagttgttgatcgtgcgcgccagtatgggcatgccctccagcagcatgaactgcttgggacgcgcccctcccatgcggcttccgccgccgcccgctacgatgatgactccagtttgtcgttccatatcagtttctttccaaaaccgagcgtattgtcggtcagtttcatataatcgggccttatcgcccagagcgtcagctcggccagcgccgcgtagggaaaccgtttgaggtatgcccgtctggccgtttcgtcggcccgcgctgccgtgccgcacagctgcaatccctgcacccggcccacgattttcgtttcgaggaccaccgatgccgcgatacgcggattgcgctccatttcctgcgcatggcgcgttgcggggtccgatgtgaatacgagcaggtttcgctccttgtcgtaacagtagaacgcattcgagcagtaggggaccccttccgcgacggtggccagcgtcagtacatggtgccgccggagaaaacgcacgaaacgttcgtttattgcttcgccgcagccgcttgtttttgccgtcccggattccgcgcttccgggtgtttccgcaaccggggtgttcctttccgcagccgggacgctccctttctcagccggggcttcttccgttttcgtttccggaaccttgtgttccgtccccggtttttccgtgtcccgcctctccgccgcttttgttgcgaccgccggctgcatctttttcccgtccgtttccgctgccgccatatgcgttatttcgctgccgtggtttcgcctgccggggcggaagccgccggagcctgcggaattacgagcgaatccagctgcgtgatgcgctcttcgtccttcacctcgccgttcagctcggccgcgatgcggtcgcgtacgaattcgaacgtcgcccggttctcttttgcgatcggctcggcgggttcctgcggaactttcagcgggtcgatcggcgtgccgtttttccagatgcggtagtcgagatgcggtcccgtcgaagcgcccgtcgaaccgacatagccgatcagctggccctgcgatacgcgcgaacccttcgaaatgcctttggcatagccgctcaggtgcaggtaacccgtcatcaggttgcccgcatgcttgatcttgagcgtgttgccgcctccgccgccccagcctttgaaggtgaccacgccgtcggcgacggcatgcacgggcgtgcctttcggtgcggcgtaatcgacgcccgtatgcgggcggtacaccttgtagatcggatgtttgcgggcgtaggtgaatttcgagctgatgcgcgaatatttcagcggcgccttgagcatctgcttgcgcaggctcgcgccgtcatactcccagtagcggattttgccgccctgccggaacggaatggcgtagtactccttgccgccctgacagaatttcgcgccccagatgcggccgatgccgaccgagacgctgtcgtcgatgaaccgctcgtcgtagatgaccgtgaagttgtcgcctttctggatgccgaagaagtccaccgtccactggtaaatgtcctccatttcggcggccagcgcatagggcagctcctgctccatgatagcgccccagagcgacgaattgatcgtggcgctcttcttggtgcggcgcacggtaaactgtttttcgcccgtgcggacgctcaccgagtcgtcgtggaatccgaagaccacgtattcggcgacgttgcgttcgtaaaccagataatccaagtgcggggcatagagcgaatcctcgtggatgaaggccgtgtacttgtgtcccgcgcggatgttgcgcagcgggaaaatatccttcgaagccttgtcgagccggtcgatcgtcagcgccgaaacgccgaatccgttcaggattttgcccagcgtttcgccgcttcccacctcgccggtctcggtgcggtaattgtcggcgttgatgccgtatacgatgttgtgctgctcggcggcttcctccccggccgtttcctgctgctgcgttctgctgcacgcccccgccgcaaccagcagcagggcgcatatgggtaatctgagacttttcataatcgaaacaaagatataaaaaaacgactcttccgccaattttattattcgtttgtcagtgaggcctgagatttgcttttttttgttttgcgttccgaagatttatttctacctttgaaaaattgtgtagataaacagaccgaagatgttgaaatgcctgcttgcacctgcagctctcttatataaagcgggggtgactttccgtcaccgcttgttcgactggggagtgctcaaaagcgagaagttcgacatcccggtcgtctgcatcggcaacatcaccgtcggcggtacgggcaagaccccgatggccgaaatggtgatcgcctacatgtcgcagatgcacaacgtggccctgctgtcgcgcggctacggtcgccgcaccaaaggctaccgggaggtgaagaccgattcccactaccgcgacgtgggcgacgaaccgcttcagatcaaactcaaatttcccggcacggtggtcgtcgtgtgcgagaaacgcgccgagggcatccgccgcatccgggccgaacaccccgaagtggacctcatcatcatggacgacggcttccagcaccgttatgtggagccgaagatcaatatcgtgatgatcgacgcgacgcgccccattcagcatgacaggatgctgccgctcggaacgctgcgcgacctgcccgaagagctgcaccgcgcccactatttcgtggtcacgaagtgcccagagaagatggcccccatcgaccggcgcatcatgcgcaaggtgctgattcaggtcgcctaccagcgggtgtatttcacccgtttcgagagcttcatgccccagccgctctatcccgatgcggctcctgacgaaccgcttctgcacgggcggcaggtcattgcgctttcgggcatcggcaatcccaagccgttccttgcgacgctgcgcgaacgctacgaggtcgtgcaggagatgacgctggaggaccaccatgtttacaaggtccgcgacctgaaccggctgcgggaactgctggcccgctggcccggtgcggtcatcgtgacgaccgaaaaggacgccgtgaaactgaccaaccgcgccaagatccccgaagagatccggcgcagcatatactatttaccgataaatatttcattcatagaggattcggctacggattttctgcaaaaactagaagaagatgttagaggaaattaaaaaaacggcggctttcatcgacgccgccaccgactctttcgctcccgaagtgggcgtcatcctcggcaccggtttgggcggcttcgccgataagatcgagacgcgcttcgccatcgaatacaaggatattccgggattccccgtctccacggtcgaaggacacaaaggccgtatgattttcggcatggtcgagggccgcagggtcgtggccatgcagggccgtttccactattacgaaggctacggcatgcagcaggtgacgttcccggtgcgcgtcatgcggcagctcggcatcaaatacctctttgtatcgaacgcttcgggcggcatcaacacctcgttccgcgtcggcgacctgatggtcatcaccgaccatatcaacctgatgcccaatccgctgatcggccccaacatcgccgaactcggtccccgctttccggatatgcacaactgctacgacaaggagctgatcgccaaggcgaccgccatcgccgaggaggagaatatcaagctccagtacggcgtgtatgtgggcggcacggggccgacgttcgagacgcaggccgaataccgctatttcaagaatatcggcggcgatgcggccggcatgtccaccgtgccggaggtgatcgtggcgcgccatatgtcgatcccggtcttcggcgtttcggtcatcaccaactgcggactctcggacgaagtgggcgaccacgaagacgtgcagcgtcagggcaaaaaggccggaatcaagatggaggtgctcttcaagcgtatgataaaagcgctttagaaggaatgtcgtttcgggccgtgccggttgtgttgcggcgttggacggactggccttccggatttttgtcacggacgttcgctgcggagtcgtcggggagggacttggatcttcaccgctgtatcccggctttggcgccgggccgctccgcagaagtgccggatgtggatttctcccggtccgtcgtgtgtttattgataattttaatgttatagattatggtaaataaggtaattttgatcggcaacgtcggtatcgaccccgaaatccggaccaccgaaggcggcgtgaaggtcgcacgtatccgtctggctacgaccgaacggttgttcgaccggcaggccaacgaggccaaggagcataccgaatggcatacgatcacgctttggcgcggtctggccgacgtggtggacaagtatgtccgcaaaggcacgcagatttacgtcgaggggcgtctgcgtacccgtgaatggatggacaaggacaataacaaacgctatacgaccgagattctggccgatgtgatgaatctgctgggccgccgcagcgacaacccgtcgtccgacggacagcagggctatggatcgcagcagggttacggttcgcagcagtcctctgccggacagtctgcaggcggctatcagcagcctgcggctccgaagcccgcccccgcgccgtcgattcccgccgacgatccggacgacctgccgttctgatccggacgccctgtcattctgatccggatgacctgccgtttttgaaatatgaaaacaagacctcccggctccgcagagaccgggggttcgttttatctgcatcgtcttgaccgccggacccgtttgggccggaggccgacttttgtgtggaatctgtttgtgtggaatccgacctcggtgaagaaccggatttacggaccggatgcaccgataattcgggagatagggggcttttcttgctgttgccgttcagccgcacctccgtttcgtttttatgtgtcggcctcgttgagagtttctggcggcaccttttcgagccgcatctgtatcggatacggtctgccgtcggtccgcaggggtgtagccgcgaacccttcattaagggtatcttattacgggtgttttgccgtcagtcgttcttgcggatgttgagccgctcccaaagccattcgggaatcatcttccagaagaataccatgaccgcatagcggcgatcgatcaccacgcggcggcgctgccgcttcaggaccttcataatccgtgcggcgactttcccgacctgcatcagcatcggataatgcccgtcgccggccagcaggggcgtggccacgaaccccggtcgtatgtccgtaaagcggatattcagtctctccatatgcgccaactgcgacagtgcgtcgatgtaggtgttctgcatgcgtttggtcgccgagtaggccggtgcgctgccgagtcctttggtgcctgcgatcgaactgatgacggccaaatgcccgcctccgtgagcgcggaaatagccgaaagccgccgtcaccatgcgcacgaatccttcgccgttggtgcgcagggtgtcgatctcgatgtcgggatgcagctcggtgttgcgtttcccgatgcccgaacagtgcaggtaaatgtccattccgcccagcttgtcgatcaggcgtgacagatgttcgggcgcatcgtcgcgcgtgatatccagcgattcggtcacgatcaggtccggagcttgggtgcggagcttttcgagcgcctcctcgcgccggcctgcggccccgatctgccaacccgcctgaatacagagttttgcgacttcgagtccgatgcccgatgtcgctccgacgatgacgatgcgtttcataccgatgcggttttagtggtttataccttaaaagtaatgattctttccgggaaatgcaaatccgccttttgccggggacgctttgtgcgtctgtgaaataaggagccgcacgcggctccttatccggattgttttttggtctgcacaagctgccgtcggtcggaaagagccggagacgaaatcatatcgcaagccccttcacggtgcatcgccgttccggtcagcaatcttccattgcgtgctggacgcattcgatgcctactttgcgcagcagattcagcccctcttccgagcggtattcctcgcagtacaccacccgtttgataccagcctgaatgatcagcttcgaacattcgatgcagggggcggcggtgatgtagagcgtcgagccgtcgcagttgttggcgcttttggcgaccttggtgatggcgttggcttcggcgtggaggacatagggcttggtgtggccgttttcatcctcgcagatgttctcgaaccccgaaggcgtgccgttgtaaccgtcggatatgatcatcttgtccttgacgatcagcgctccgaccttgcggcgcacgcagtacgaattctccgcccagatgcgcgccatgcgcaggtagcggatatccagctgacgttgtttttcttcgttgtagcccatttccggtttacattcctttgccgtggcactgtttgtatttcttgccgcttccgcaggggcagggatcgttgcggcccactttcttctcgacgtgcatcggcatcggtttctgtttgtcctgctgcccggcctgtgccgccgcctgcatgcgcgaagcctgcagtttgttcacgtccaccttggcgcgctcctgacgctggcgctgtacggcttcggcgttctggtcccgcaccggaatgtaggccttgttgaggatcgacagcacgtcgcggttgaccttgacgatcatcttcgagaagagtccgaacgattcgaacttgtagatcagcagcgggtctttctgctcgtaggtggcgttctgcacgctctggcgcaggtcgtccatttcgcgcaggtgctcgcgccatgcgtcgtcgatggtggtgaacatcaccactttcgagaatatcttgtagatctccgcgccgtccgtgttcttgcatttcagcaggttcaccgggacgttgtagcccagatggccgtccgtaatcgggaagtagatgttcgaatccagctgatccttcttgtcctcgtagatgcgctccatgacggggcgtaccgtgtcggccacggccttggcacggcgtgcataggtctccttgaggtctttgacgatcagttccaccagttcggcgggcttcgccgagccgtaggtctcttcgccgaacgacggttctacggccacttcgcggatcagctcgaagcggaaatcctcgaactcgatgccgcggttggtctccacgaaattgtcggcgtagtcgtacatgatgttgttgaggtcgatctcgatgcgctcgccgtagagtgcgtgacggcggcgggtgtagatcacctcgcgctgcgagttcatcacatcgtcgtattccagcagacgcttacggatgccgaagttgttctcctcgaccttcttctgcgcacgctcgatggcgcgcgtcatcatgccggcctgaatcacctcgccctccttgagtcccatgcggtccatcatcgaggcgatgcggcccgaaccgaacagacgcatcaggtcgtcttcgagcgatacgaagaactgcgacgatccggggtcgccctgacgtccggcgcgtccgcgcagctggcggtccacacggcggctttcgtggcgttcggtgccgatgatcgccagacctccggcctgcttgacttcgggcgtgagcttgatgtcggtaccgcggccggccatgttggtcgcaatggtcacctgtcccgaacgtccggcctcggccacgacttgggcctccagctggtgctgcttggcattcagaacgttatgcttgatgttgcggagcttgagcatgcggctcagcaactccgagatctcgaccgacgtggtacccaccagcaccggacggcccgcttcgaccagcttcacgatctcttcgatcacggcgttgtatttctcgcgcttggtcttgtagatcaggtcctgacggtcgtcgcggaccacgggacggttggtcggaatcaccacgacgtcgagtttgtagatgctccagaactccgaagcctcggtttcggccgtaccggtcataccggccagcttgtggtacatgcggaagtagttctgaagggtgatcgtcgcgaatgtctgcgtcgcggcttcgaccttgacgtgctccttggcttcgatcgcctgatgcagtccgtccgaatagcggcgtccgtcgagaatacggcccgtctgctcgtcgacgatcttcaccttgttgtccatcaccacgtattcgacatccttctcgaacatggcgtaggccttgagcagctgatgcaccgtgtgcacgcgctccgacttgatcgagtagtcgttgatcacctcgtcgcgtttgcgggcgcgttcctcggccgagagatcgctcttttccagctcggccacttccgcaccgatgtcgggcatcacgaaaaatccgtcctcgttgaagtatttcgacagcacttcatggcctttgtccgtcagttccaccgagttgagtttctcgtcgatgacgaagaacaggtcgtcggtgatttcgggcatgcggcggttgttgtcctgcatgtaagtgttttcggtcttctgcatcagcgccttgacgcccgtttccgagaggtatttgatcagcggcttgtatttgggcagacctttgtgcgcacggtagagtttcacgccgccttcgtcgttcttgccctcggcgatgagctggcgggcttccgccagcagccccgtcacgaggttcttctgcaggttgtagaggtggtcgatggccgggcggtactgctcgaacatctggtcgtcgcctttgggcacgggacccgaaatgataagcggcgtacgtgcgtcgtcgatcaatacggagtccacctcgtcgacgatggcgaagtggtgcttgcgctgtacgaggtcggcgggcgacgaagccatgttgtcgcgcaggtagtcgaagccgtattcgttgttcgtgccgaaagtgatgtcggccatgtatgccttgcgccgggcgtcggagttgggctgcgtgtcgtcgatgcaggccaccgacagcccgtggaactggtacatcggccccatccactccgagtcgcgcttggccagatagttattgaccgtcacgaggtgcacgcccttttttgcgagggcgttgaggaatacggggagcgtcgccacgagggtctttccttcgcccgtcgccatctcggcgatcttgcctttgtggagcacaacgccgccgaacagctgtacgtcgtagtggatcatgtcccacttgaggtcgttgccgccggccatccagtgattggcgtatacggccttgtcgccctcgatggttacgaaatccttgacggcggccagatcgcggtcgaaatcgttggccgtgaccactaccgtctcgttctgggcgaagcggcgcgcggtgtccttcatgatggcgaacgcttcgggcagtatttcgtcgagtttctcctcgatcttttcgtcgatgcgtttggtcgtctcgtcgatctccttcgagaccttctccttctcttcgagcgatgtctcggccaactccagcttggctttcagctccacgatgcgggcttcgtcggctgcgatgaaatcggcgatctgcttcttcagcgcttcgcttcgggcgcgcagttcgtcgttggaaagggcttctatggcagggtagacggctttgatcttttcgagataaggctcgatctgcttgcggtccttgtcggctttggagccgaagatgagtttgattaaactggcagctatatccatattcgttttctgatatttcggggttgtggttgtaaatcctacaaagatacttatttttcccgaatgcacaaaaaaataggtccctataaagggacccaatgcggggtttccgcgattcggagccgcattccggccgacgggtcaccgtcttttgtggagccggtaatagaggacgaaaagcgcgggggtgcggtttatcaggaaatggcggaagttgtatttgcggaatgcgagcggcatgactccccgctgccgggcgtcgcgcagcatttcgcgggcgttgccctgtctgccgagtatcgtctgtttgcaggcgaaaaacatcgttttgcccacgtgcagccgcatcaggcgtgcgccttccggatcgctttcttcgatacgggccgcgaagtcggtcaggcttttcatcgcccggacaaagtccgagcggcgcttcggatcgtagcttcccatgaacgatccgttgtgctgcaggtagttgtacacccggatcgggacatatcggatccgttttgcgaagtaaatggcgcgcggggtgaactcttcgtcctcgtgccgcatcgggagcatgccgagtccatgccgttcgagcatcgtccggtcgtagacgtaggcgcaggccatgggcaggaagcagtcccgacgcaggaaatcgcgtccgctctgcacctccccgccgccgcgtgcgaaaagcccgtcgctccagagcggaaggtcgccgccgtgttcgtcgacgcccgccatgtcgaaacagagcatgtcgagccgctcccggtccatgatctgcgtcagccgtccgagaacgccgggcgaaaggtagtcgtctgcatccacgtacatgacatatctgcccgcggcgcgctccgtgccgtaattccgggccatgcttacgccttcgttgggtttggcgtgcacttggacgttcgcatgcccgcaggccgcccgctgcgctgcggccaacgaaccgtcggtcgatccgtcgtccaccacgatcacttcgtactcttcgggcggcaggtcctgatcgagggccgaagcgatacacttgccgatcagcccttcgaggttgtacagcggaattatgatgctgatttttttcatgacgcgagaagtcggacgaggaacagacgcttgtgaatccagactctccacgacggatagaagagtccgcaggccattttgtaccggcgcataagctgccgtttgagcagcttgggatcgtgtgaatgccggatgccggccttgtagagacgtgtgagaatgcggcggtacgaggcgagttcccttttctttacctccccggtccgcagggagaaacgggtgaagatgcgggcttcgtcatccgagagccggacgcccagtttgcgcgcgagttgttcctgctgggtaagctgggcgctgagggtctggcggtccagttggcgtgtcgagatttggtcttcccatcggcggtagaaggtcaggtactccggaatgttggccatgcggaggtgttccgaaagatcgacccatagctgatagtcttcggccatacactcccggaagcgtatgccggtccgtttgaaaggttcgctgcgcagcatgacggacgacatgccgaacgggcacccgaaaaacagttggtactggatttcctcgtgggtgagcggcacttggattttcagttcgtcattttcccccccccttgtgccgaacatcgtgtagtaactgccgcagatgtcggtttgcgggtgtcgttcgaagaaggcgagctgtttggcgaagcgttccggagagcagaggtcgtccgcatccatgaaggtgatgaattttccgcgggcggcgtccagcgcccgattgcgggtgcgtgcggctcccgaattgagttcgttgtgcatcagtacgatgcggttgtcctttgcggcgtaggcgcgtgcgatctcggccgaagcgtcggtcgatgcgtcgtcgatgacgatcagttcgaagtcgccgaccgtttgccggaggacgttctcgatgctttcgccgacgaatcgctccgcattgtagagcggcatgatgacgctgatcagtggtgtttgtttttgcatggtggtagagttagttgtttccgattttcagattgttcaggatgcgccgcccgacggggcactccgcgcaccgtttggcggcgcagtattccgtcgccagctgcaacagggcctgcgactcgaaggcgctgcggggcgtcagccccgcgtcgtgccagccgcgcatgtaacggttgtcctccgcgggcaggcgttcgagcagcgtcagggcgctgtcgcgcagggcttcgcgtccggtgtagctgccgtaggcgaattgcagcaccgagacgaggttgatgccgatgatgttggccttgaaagtccccagacgcttgggcctgtcgtcgcctgcgattcccggaatatggtgcgtccgccagtaatccgaggcctcgacgcagaagagccgccggatctcctcttccgtgcggcaggccatggcgcgctccatgacgaactcgtcctgagcgaagaattccgcggcttgcgccagccgcagtacggggtggttggccgggcgtatgtcgcccagctgccaagctccggcctgcatcggttcgatgtcgtatttggccgccagatattcgaaattgcgggcgaggttgagcgtgtaggtgtcgtgcggatagagcgccagcagtcccgacgctccgaaaagcagcgattcgacggcatgcggcgccagccgttcgcgcagaacggttttgtaggatacgcgccgcgccagcgtgaggtaggcttcctgattctgacggtcgcccagcgtgcggaagtagagcaggtagaaggtctggttccagttctccgccgcttcgtgccgcagcgcctccaccatgcgcattttgcgttcgagccggtcgaagagcagcgacgtgcatatctcgctgcgctgcaaggctgactgtcccgcgaggaatccgccgcaggcgtaagccccggctccggcccgaagccggttcatcgcgcgctgttcccgctccgccgtcatgctaaaacagattgagctccagcagtgcctcttccgacatcatgcttttgtcccatacgggatcgaacgtgagaatcacgttcaccgacttcacgcctttgaccttggctacctgctggtttacgtcttcgacgagcatgtcggccatcgggcagttgggcgcggtgagcgtcatgcggatgttggcgacgccgtcgggcgtgtagtcgatctcgtagatcagtcccagatcgtagatgtttaccgggatttcgggatcgtatatgttcttgagcgtaaggacgatctccttctcgaccttcagtatctctttgggtgtcatcgtgacattgaaattaagcgttgaaaactaaaaaccgccggaaactctcccttccggctttccggttccggccgattcgcagggccggacgcctcttctgccgaaagaaacgttggtttccgattttttatttttcgttcgcaccgtccttgctcgcgaaggccagcgcatagagccgcatctgcttgaccattgacaacaagccgttcgaccgcgtgggcgagaggtttgcgctcaggccgatggcgtcgatgaaatagagctccgtgtcgagaatctcctgcggcgtgcgaccgttcagcacgcggatcagcagggcgatgatgcccttggtgattatggcgtcgctgtctgcggcgtaatagacccggccctgctccatgcgggcgtccacccacacgcgcgactggcatccctcgatcaggtactgcacggtgcggtgctcggcggggatggccggcaacgaatcgctcagaccgatgaggtagtcgtatttgtcgagccagtcgtcgaataccgagaactcctcgatgatctcctcctgtatcttatccatgtccgtatattttttaatccttaaaaatcgatgatttccgggagcacttcgccctccgacgccgcaggttcggtgatctccagcacccgcgccacggtcggcgccacggccgtcatgtccacgcggcgcttcacgcgcaggggaccggctccgaagccgtaaaataccagcggcacctgcgtgtcgtagccgtacatcgaacccgacgacgatgcgcagcggtcgttctcctcgatccagccgggcatcaggttcatgatcacgtcgcccgaacgccggggatagaagctgttctgcatcttgcgggcgtagccgctgccgaagtagctcgtgcgcatggccgtggccgagagggcgtgcgagacgccgcggaactgcatggcgaagatcgccacctcgttctgcacgtcggccagattgagtccccgctcgtagatgaggttgtggttcaggtagaggcatttgtcttcgtactccagcacccagttgcccatgccgtagcggacgttcaggaacccgtttacgatcacctcgaactgccgggcgttgaaccggtcggcctcttcgcggcccgcgtcgtacgaggggctggttccgtggtccgacgtgaatacgacgagcacttcgccgttcttgacctgcgcgaatacgaacgtcaaaaagtcggccagatcgcggtcgagccggtaatacatgtcctccgcctcgaccgattcgggaccgtaggcttcgctgatgcggcgcgacgaatcgagacagatgttcagcaggtcgggcgtgccgtcggtgccgagcttgaactgggcgatggcctgcttggcgaagccgaatacggcggtgttgcccgccggggtgtagagcatccggtcgaaatcggtggtgagcttcaggcggccgctgcccgtctcgtccttctcctttttgttcttgcccgtgaggattacgtcccagttgcgggagttgacgtagcggcccttttcgtagagcgtccgccattcgggggcgatgtacgagaggttgtagcgttcgcggttgctgcgcgccacccattcgggaacgtcggcggcgtagtagggcgaggtggtccagccgcagcgcgccgagtcgagccagaagacctcgccgccgcgtccgcccaagacgatcgccgacgtggcttcggccgccacggtgacggccttgctgccgggttcgtgctgcaggagcgcttcggagagcgtcggggcgatcaggttgtaggggcctgcgccgttgcgtccggcgatcagttccacggcctcgttggcgacgtagtcgcgccagcgcgagccgatgaccccgtgcgtcgagggcatcgcgcccgtcgataacgtggccagcgacacgggcgtggtggtctgctggtagtcgtaacggctgtcggcgaagaccgtgccgccgtcgatcaggcgccggagtcctccttcgccgtaattgtcggcgtaacgcgagagatcctcggcgcgcatcgagccgacgacgatattaacgaccagccggggccgtgcggccgagacttcgagggccgcgaaggcggctatggcgagtaaaatgattttgtgcttcatggtgtgcgaatgataggccgcaaatttacgaatttatttcgatacatcggcggaaatattccgcttcggtccgaaaatcgatctgcggcagcgccgcgatctcttcgagcctgcggcggcagaactcgcggtaggttgcgctctgcgggttgcggggccggtgcgccgcggccacgacgatatggcggacgtcgggcagcagacgccgggcctgctccgagagaaccgtcgccgagaacttctcccagacgtattccacggcctgcggagacggatgcaccagatcgtcggcgtagaaccggtagtcgcgcaggtcgtcgttgaggatttcgtatgcggggaaatagtgaacgtcgggaaaacgctccgccagctcttcggcggccagacggagtgcggctttgctcacggcgttgcccgccagtgagtcgccgagatgccgcacggggctgaccgtaaggatcacctccctgccgccgagcggacctgccatgaggtctgcgaaagcggtgacgatctcgtccacgcccagcctgcgccgcgtgaactccgcggcgggccggcggtggcagttggcgaccaccgcgccgtcgtgttcgtagacccacgccgtgccgaaggtcagcacgatccggtcggccgcgcgcagcgcttcggctccgctcttccgggcggcgttcatcgccgcgagggcttggtccgcttccggggcggaaaaagagccgtggaacccgtaatggaaccacaattcgccgtcgaatcccaattccgaatgtcgtacgggcttctcccctgcgtagctgcgcagcgcggcggcgatggagagcgggttgaacagaatgcccgaaggattggccgtgacgcggaattttgcctgtgccagccgcccggcgatgtgttccgcgaaacaggagccgagggccagtatgcggttctcgtagccgatcttcgttccaaggggcgcaatttcgatttcggtgcggaatttcatactgcaaaagtacaaattttatatctttgccgtatgatcttacgggcaaactgcaaaataaatctggggctggatatcctgcgccgccgtgcggacggttatcacgacctcgaaacggtgatgtttcccgtgcgcggactttacgacgaagtcgaggtcgtgcgcacggccggggcgggcgtggatttccgcgccgaagggctcgcggtggactgcgaacccgaacagaatatctgtatcagggctttccggctgatgcacgaccgttacggcgtggacggcgtcgctatccggctcgacaagcgggtgccgttcggcgccgggctgggtggcggttcgtccgacggcacggcggttctgctggctctcgaccggcttttcgacctgcatctgcccgaagcggagctgatcgcccgcgccgccgagctgggcagcgatacgccgttcttcgtgcgcaacaccccgcagttctgcaccggacggggtgagatcatgtcgcctttcccgctcgaccttgcggggctgaccctcgtgatcgtgaagccggacgagggggtctctacgcgcgaagcctatgcgggcgtacgtccgcgggtgccctccgtgccgcttgccgagcgtctgcggcgtcccgtcgcggagtggcaggagattgtgaccaacgatttcgaaccgcatatcttcgccgcgcatcccgccatccgcgcatccaagcggaacttactcgatgctggtgccctttacgcttcgatgtcgggcagcggctctgcggttttcgggctgttcgaccgtcccgaaaaagcagagagcctgcggtcgcagactcccttcatcttttcgttgtaggcgttgcccggtcttgggcggatgtgattacggcgtttgccggttcgatgtccggctggccgtgcctgcatcgcatctgttctgcccgcattcgtttctggtcgcaggcgtctcccgatcggctatttttcagccgcaacgccgcagggtacggccatcttctcgatacggtgctggtggcgtccgccttcgaactgcgccccgaagtaggcgtcgagcatcgccacggcctcgtcgttggtgatgaagcgggccgggaagacgatgatgttggcgttgttgtgacggcggatgagcgatgcgatctccggttcccacgccagtccggcgcggatgccctgatgcttgttgagggtcatggtcatcccttcgcccgaaccgcagagggcgatgccgcattcgaattcgcctttctcgaccgcttcggccagcgggtgtgcgtagtcggcataatcgacgctttcgggggagccggggccgaagtcgtggacgtcgtaacccatggccgagaggtagcccaccagaaattctttcatttcgtagccggcgtgatcgctggcgatacctattttagtcatcgtatttttgtttttgtgttgtttttaggttctgtcatacaaagataggcaaaaataacggtcgccgctcttccgggttccgaatttatgctatttttgctccatgaaatttttcctcgccgccttggggtgtctgtcgttcgtgctgggtgtcgtcggtattttcgtgccgctgctcccgaccacgccgtttctgctgctctccgccgcattgtgggtccgctcttcgccccggctttacgattggctgttggcgcacccctgtctgggcgggtatgtccgcaacttccgcgaaaatcgcgccataccgcttcgcgccaagatcgtttcgctcacgctgatgtggggaacgatgctctactgcgtttttgcgccgctctccggatggtggtgggcgcaggccgcgctgctcgccgtcgccgtgggcgttacttggcatattctttcgtttgcgacgctaaagaaatgaggcttgaagggaatgccgggcggataatgtcggatgaatggcgccggacggatggcgccgggcaataagcgtcggatgaataacgccggacgaatggcgcccacgaaaacggcccggagtccggaaagtaaaagccggcccctcctccgggtttccggggatttacaaaacaatgctgtaacctaataagttacagcgttgtttttttatgaggtaatgatttagaaacgtaagtctcgaataaacttacatcgaggttcatcctgtcaaacaactctatataaatatacgaaatatctgataaaaaagcaaatagaatttttatctctctatttgccgatttatgacggacatcagcgtcatcgcggatcattttttcatttgagcggactggaacggtctggagcggacatggaaatcgttttctgaaggcttggattatcttgcacatccttaccgcagaaatcacctaaacccaacaattatggattgcgtccttatggaaacgagcgcctataaagagttgcaggcgcaccttcaacgtcttctggagcgaatagctgcgctccattctctctccgtccaaccgacaactgtccggggcttacggccgaggaggtctgcaaggctttgagcatcaccaagcgagccttgcaatactatcgttccgccggcatcatcccctatacggccttggggaataaagtattgttccgggacgacgacatccggcaacttctggaaaagaacctgataaaaagcctgtagcatgaccgaagagatcatcacccgcgacagcgccgcgttcaaggaactgcgccgcgatatcgtcaaagccatccgtgccgttgatattctaatcgacacgcacctcccagtcatcggcaatgaactgtacctgaccagtgaggagatttgcagcatcttcagcatctcgaaacgctccttgcagaattaccgggacaaccgccaaatcccttatactactcttggtggaaagattctttatccgcagtcatcgctttataaactgctggaacagcattatatgaaagcgcagcgctgatgcggtctgtgaaaaggggaagatcacttgaactgcaccccaaaagttggacataacttttggggtgttttatgaagtacagttatgaggagaaattaacagcagttttgtctgttgtcaatggccaacattccgtatcgtccgcctccaagcattttggaataagctatacgcctttgtcgcgttggattgcgcgttataaagagttcggcgaagcaggtcttcgtatacggcaatatacttacagcggcgattttaagttgtcagctatcaggcacatgcacgagaatcacttatctttaacggaaacaacggcaaagttcggtatttacaatgagagtacgctgagcagatgggagcgtatctattatgaagaaggtgaatccggtctttaccgtgataatcggggtaagatgagaaccaaacctaataaacaggaactacaaccacaggaagaaaatgacttgcgagtcgaaaaccaacgtcttcgcgccgaggtcgcttacttaaaaaaattgaggatcttagtcgaggaacgcatcgtccgcgagaacgggaacgggcaaaagccatcgaagaactaagaccggaacatacccttcccacgctattggaagttacggggatggcgcgtagtacgttctattatcatctgaagcagttaaagttccccgataaatacaaacaagagaaaaacgagattgtaagtatataccacgatcataagggacgttatggttaccgccgtatcacagtagagatgcacaatcgcggatattctataaaccataaaacggtacttaggttaatgaacgaatgtggagttaaatgccgggtgcgcctaaaaaaatatcgttcatacaaaggagaggttggtgccgttgtgcctgacttgctgaaacgtaattttatggcggaacgtcctaatcaaaagtgggttacagaccttactgaattttctctgttcggcaagaaactttatctgtcgcctattatggacttatataacagggaaataataagttataatatagctgaacatccgaccttttaccaaacaatgaaaatgcttgaagatgccataaaggatctgcccgatgctccggaacttatacttcactcggatcagggttggcagtaccagatgaaacgctatcaatatcggctgcgtgaaaaaggtattagtcagagcatgtctcgtaagggaaactgtttggataatgcggtcatggaaaactttttcggactgttaaaatcagaattattatatttgcagaagttcgagtctgtcgatcatttccgcaaggaactggaggaatacataaattactacaataacaagcgaataaagaccgcattaaacaacatgagcccggtacaataccgaactcatgctatctgaattattaatcagtccaaactttggggtgcacatcataatatatttatatactttatcgcaaagtgtctacacggagaatttcgttgccagtttctcccggagcatggtaacctcacggtcgatcatcggcggggtgactttcgcatagatttgagtggtggtgatatttttatgtcccagcatcttcgaaagcgtctccagactcacaccgttcgacaggcagatcgtcgtggcgtacgtgtgccgggcaaggtggaatgagagttgtttgtcaatgccgcactcccgggcgatgtttttcaggctgtcgtcgatcgaatcgagtgtagacatggcaaaaacacgtccgtcgccggtcagaccccgatacttgttcaggatgaacaacgcataaggcagcaacttgacaacgtatttggtttcggtcttctggcggttgccgctgatccaccactcgccctgcgcatcctgctcgatccggtcataggtcagcgaggccatatccgcatagcagatgcccgtaaagcaggagaacaggaacatatcgcggttatagtcctgacgcttataccgcagctcggtagtcatcatacgccggagttcatcttccgttaaaaaactacgttccggattcggagccgtatattgatagagggaaaaggggttgcgaggcatccagccgttgttgaacgcgattttgacaacgtatttcaggcatttgagataaccgctgacggtcgtaggcttgagccccagatcggatttaaggtagacgtggtattgctcgatgaacgactgttccaactccgccaacggcatatcgctcacgttatactccttacgcatgaaagtccgcagatggtcgatggatttatagtagcggttccatgtaccgtggcagcggtcgatgccgacacgtttcttgaggtcgccggtgaatttctcgaacgcttcgagaagcagccggtatttctctccgaagccgagataggcattcttgaccttttcggccgtaacgtatgactcccggtcgcagatatcctgatagtgcttgccgatctgggtgcggatgttgtccagatgacggttgatgcgatccgcttcgagactgcggcctttggcgcggccgccgctgacctcccaaagcgtttccgggacggagagcttcgcgctgaactgcgcgatgctgccgttgaccgtgatgcgacccatgacagggacgactttctgatctttgtctttgttccttttaaggtagaacagaaccttgaacgtgctgcgcataaactctgctttttagggttgcaaaaataatttcagcagagtcgtatgtcaagatgaataacgatgcaagaaactgaaaatcacgtttctatgaataatagagcgaaagaaacgaggtaacgatttggaaaccgaaacctcgtttaacattaccttattctactttttctctaaaacaaaggcactgaagaaaagtgtataattatttgattatcttttgctttacacttttttacacctctgttttttatccccggaaatcgtaagaagggccggttcttatgtatctctgccggtttactcctgcgccggctgtttgtccagcatttcgagcaccgaatactgtaccgtgtagtatccttcgtccactccgacgaccgaggtgccgactttcagcttgtagctgtagccctgctcgtagtcgaatccctcgatccggaacggccaccgctgccagtcgttcaggccgacttcggggaaacggacgctgaggtacaattcgccgtagtaactgacgggttcgggggctacctccatcgtgaacgtggggtagtagctgtcgggaatattggaccgcgtcgggattttcgagatcagttccagcagcgagtaccgtacggacgatgcgtcctgcggcggttcggccagctgcttggccttgatgcggagtttgtattcgtatccgggttcgtagtcgaatccctcgatgccctcgtatacggcgcgccacgaagtgtcgtcgttggctttgacgagcagcacgggctgcagcgtgtggaacccgtgggagatgcccagctgggatgcgacggtccattcccggaccgtataatcgtcgttcttgtcgcatgcgccgagcgcaaaagcggatatgaagagcagtatgatgtattttctcatggctttccgtgtcgtttcattgtataaatggagacaaccgcctgatactgcatgggatatacgaaaaaaaacggacatatgtccgttttttgcatcttttaccccaaatagcgttccgccacgccgatcaggaacccgaacagcaggccgttgaacaccacgaccgggatcgccttgcggtccttgcccgaaaaggtgaacagcaccggaatcatcagcatcagcgtgacggccatgccgtcggcccaccacggcaggtagggcaggtcgctgtagaagacgatgaccgcggcgaagaagtagatgaagaacgccgagaaacacgaccgtgccgacaaattctggaaaatcatcggaatcacgtcgagcgctccggccacggcgcctaccgccagcgaaagggtgaagtggtccatatcccggagtttatttcgatgcccgtttgcggtccacctcgtgcagcagaatcttgcgcagacgcatcgaatggggcgttacttcgacgtattcgtcggcctgaatgtattcgagcgcctcttcgagcgagaagatcttgggcggggcgatcgaggtcttctcgtccgaacccgacgcgcgcatgttggtcagctgcttggctttggtgacgtttaccgtgatgtcgttctggcgcgtgtgttcgccgatcacctgaccttcgtacacctgctccatcgggctgatgaagaagcgtccgcggtcctgcagcttgtcgatcgagtaggcgtaggccgtgccggtctcgcccgaaatgatcgagccgttgacgcgcatctcgatatcgccgacccacggttcgaagcctttcagccggtgggtcatgatggcttcgccggccgtcgccgtcagcatgttcgaccgcaggccgatgatgccgcgcgaggggatgctgaattccagccgcgtgcggtcgccgttcgacgccatgttcgtcagcgtgcctttgcgtttggtcgccagttcgatgaccgttcccgaatactcttcggggcagtccacggtcagctcctcgatcggttcgcattttttgccgtcgatctccttgacgattacgcggggctggcccacctgcagttcgtaaccctcgcggcgcatggtttcgatcagcaccgataggtgcagcacgccgcggccgaagacgttgaaactgtcggccgaggggccgggagtcacgcgcagggcgaggttcttctccagttcgcggtcgagacgatccttgatgtggcgcgaggtgacgtatttgccgtccttgccgaagaagggagagttgttgatcgtgaagagcatcgacatcgtcggttcgtcgatggcgatggggggcagcggttcgggattctcgtagtcgcagatagtgtcgccgatctcgaatccctcgatgcccatcagggcgcagatttcgccgcagggaacttcgtccgccttcttcttgccgagaccttcgaagaccatcaggtccttgatcttggtcttctgcatcgtcacgccgtcgcgcttggccagcgtgacgttctggcccgccttgagcgagccgcgcgtcaccttgcccacggcgatacggcccgtgtaggaggagtattcgagcgacgtgatgagcatctggggcgttccctcgacgatcttcggttcgggaatctcgtcgatgatggcgtcgagcagcggaacgatcgagtcggtcggctcgttccacctgtgcgacatccagccctgtttggccgagccgtagatggtcttgtagtcgagctgctcctcggtggcgtcgagcgaaaacataaggtcgaaaacctgttcgttcaccacttcggggcggcagttgggcttatcgaccttgttcacgacgacgatgggtttcttgcccagcgccagcgctttctgcagtacgaagcgcgtctggggcatggtgccttcgaacgcatcgaccagcagcagcacgccgtcgcacatgttcaggacgcgctccacctcgccgccgaagtcggcgtggcccggagtgtcgatgatgttgatcttataatccttgtaaattaccgagacgtttttcgagagaatcgtgattccgcgttcacgctcaaggtcgttgttgtcgaggatcagctctccggattgtttggcgttgtcgcgcagaatgttgccggcgaggatcattttatcgacgagcgtggtcttgccgtggtccacgtgtgcaataattgcgatattgcgtagtttttgcatgtgaatagattttgtggtgcaaaggtaacaatttctccggaaaatgtactaaatttgttggcttcttaaaaaagttaaagatcatgaaacccaccttcaacgttcgggaacaaagcgagatttacatcggtcccacggccgacatcctctccggggtgctgcctgaggggcgcgtgatcgtcgtttccgacgctacgatcgaccgcctttaccatccgctgctggcgccgtacgacacggtgctcatcggtgcgggcgaaagcataaagaccctgcagaccgtggaatccatctaccggcgttttatcgagctgggcgcggaccgctccacgttcgtgctcgccgtcggaggcggcatcgtgaccgacgtggcgggtttcgccgcggcgacttacatgcgcggactgtcgttcggattcgtctcgaccaccttgctggggcaggtggacgccagtgtgggcggcaagaacggcgtgaatgtggacgggtacaagaatatggccggaaccttcaaacagccgcgcttcgtgatctgcgatcccgaaatgctgcgcacgctctccgaccgggagttccgcacggggcttgccgaggtcgtcaaggcggccgtcatcgccgacgccgatcttttcacccggatcgaaaacgtctctttcgaggccctgcgcgccgataccgacctgcttacggacgctatttccgccgcggtccgcgtcaaggccgatattgtcgaacgcgacgagcacgagacgggcgaccgccgcaagctcaacttggggcatacgctggcccacgccatcgagaagtgctcgaaccggatgaatcatggcgaagcggtggccgtcggcacggccctgatcgccgacgccgcggtgaagctgggcgttctgctgcctgccgaccgcgaccggatcgtgaacgtgctggagaagctgggtttcgacctcacgccgcctgtcgatgtgaaacgcctgctcaaagaggtgggcaaggacaagaagagcgaggacggcatgctgcgcatcgtgctgcccgtgggaatcggcgactgcgaagtgcgcccgatgccgattgccgatttcgccgcgctctttgcgtagggcatacgacgcatatccataaacagaaagaccccgctcgacggcgggggcttttctatatacgacttatcgttaaatctcggtcatggtcctcagcttttcgatgtaggcgtcccagtccgtgatgggctgccgggctacgcccgattcgatcgcggcgcgtgccacggcgggcgtcacggtgcagagcagacgcgggtcgagcggtttgggaatgaggtagccgcggccgaattccagtttgcccagcgcataggcgcgcagtaccatgctcggtacaggctcctgcgccagttcggccaaggcgcgtgccgcggcgagcttcatcgcttcgttgatcttcgtggcccgtacgtcgagcgccccgcggaaaatgtaggggaagcccagcacgttgtttacctgattggggtagtccgagcggcccgtcgcaaagatgatgtcgggacgcgaaacgacggctttgtcgtaggcgatctccggatcgggattggccagcgccatgacgatcggattggtcgccatcgtgcgcagcatttcgggggtcagcacgtcggccttggatacgccgaggaatacgtcggcgtcgtgtatggcttcggcgagggtggtgatgcggcgggtggtggcgaattcgcgttttatctcgttgatgtccgtgcggtaggtggtgaccacgccctgactgtcgcagaaaatcatgttttcgcggcggacgcccacggcgatgaagagccgcgcgcaggcgatggccgccgcaccggcgccgttcactacgacgcggagtttgtcgagcgctttgccggcgattttcgccgcattgagcagcgcggccgtcgaaatcacggccgtgccgtgctggtcgtcgtgcatcacggggatgtccagctcttcactcagcctgcggtcgatttcgaagcactccggagccttgatgtcttcgaggttgatgccgccgaaggtcggggcgatggccttaaccgtgcggatgaacgcttcggggtcggtctcatcgacttcgatgtcgaaagcgtcgatgtctgcgaacgtcttgaacaacatgcttttgccttccatcacgggcttgcctgccagagcgccgatattacccagtccgaggacggcggtgccgttcgaaatgactgctatcagattgcctttgttggtgtagcgatacacgtcgtcgggattggcctcgatggcgcggcacggggctgcgacgccgggcgaataggccagtgacaagtcatgctgcgtgtgatagggcttcgtcggtacgaccgctatcttccccggacggccctcactatgatagcgaagcgccgcctgatccattttgttacctttgctcattatcctaactgttttgtttgcgtctaaaagacaaaacgttaaataacctgcaattattgcgcccggccggcattaaaaatagaaccggatgcctccgcccagctgaacccggaagatgccggccaagttcagctcggccccgtcgtccacgtcgggcgaatcgacgatcagccactgcccgccgacggtgacccccagtccgaggaagcgcgtcagcatgaattcggccgataccgactcgtgaattcctacgccgcccctgctgccagtcaggccggcgtagctgcggatgtaacggccgtagccgatacccgcgttttcgcggaagagccacctgcgtccgacgcgctgccgtgcgacgaattcgggggcgatgtaatgaatgcggctggtgcgttcgaaacctccgcgccgggccgagatgaacccgcccgaatagacgacgccgacgcccaaaccccggcgcgacgtccagttgtatcccgcggtgatctccagtccctcgttcagcgaaccggaagaactcttgcggaggtagatcgtggagaggatcgccgtgtacccggcgttggcgaagaacgtgtgctgcgaacggccccgcggggcgagatgccgggcgcgtttgctccggtcgtccgacggcgccgttctgagcggcgcttccgccgtccgggtttgcacttccgccgtccgggtttgcacttccgccgtccgggtttgcactttcgttgtccggccccgctctcccgtggtccttacctgcattgccggtctccgggcttgcacttccgttgtccggccccgctcttccgccggcgtgcaagccgccgcagacccactcgtgccggatacggccgctccgggggcggccgcatggagccgcgcggcgcagcaggtcagcaggacgagcgccgccgtgccgcagattcgtgaagccagtgatgatcgttgaatcatagtcgcatctgttttatgctaggtctcctgcgagacttgtcgctaaaaataaaaacgcaggccgccgttgaggctgatgcgcgaaatgccgcctttctggtcgtcgttgtattgcgacaccgcgtcgtccatcgaacagaaccatgtgccgtaagctccgacgctggccccgattccgacgttttgcgtcaatttgtattcaaagccgggcggacgggtcagaacagcagggtgtcgcttccgccgggcggagtgaatcccatgtggcggtacgccagttcggtggcttcgcggccgcggggcgtgcgtttgaggaagccttccttgatcaggaacggctcgtaaacctcctcgatcgttccggcgtcctcgcccacggcggtggcgatggtgttcagtcctacgggaccgccgccgaacttttcgatgatcgttccgagaatcttgttgtccatctgatcgagtccgcgcgagtctatgttgagcgccgcgagtccgatctgcgtgatttcgaggtcgatgtgcccttcgcccttgaccatggcgaagtcgcgcacccggcgcagcagcgcgttggcgattcggggcgtgccgcgcgagcggagcgccacctcgtgcgccgcgtcgtcgtcgatcgagacgtccagaatgcgcgccgagcgtttgacgatgccggccagcaccggagcgtcgtagtattccagatgacactggatgccgaagcgcgcccgcaggggcgaggtcagcaggccgctgcgcgtggtggcgcctatgagcgtgaagggcgccagctcgatttggatcgaacgcgccgaagggcctttgtcgagtacgatgtcgattttgtaatcctccatggccgagtagagatactcctcgacgatcggactgagccggtggatttcgtcgatgaagagcacgtcgcccggattgagactcgtgagcagccccgccagatcgcccggcttgtccaatacgggacccgacgtgacgcgcagctgcgcgttcatctcgttggagatgatgttggcgagggtcgtttttcccagtcccggagggccgtgcagcagtacgtggtcgagcgagtcgccgcgcatgagcgccgccttgatgaagatgcggagattatcgacgattttatcctgcccggagaaggtttccaactcctgcgggcggatcttgttttcgaattcgagatcgctctcggtgttgcgtacgatagacatgatgcaaagatagcatatgccgcggctaaaaacaaatttatttgcggcgcgccggaaggcccggttttggcctgaaaggatggagtgttgcggggttttcgcggcaagacaaaaaaatccggcccgcagattctgcgggccggagcgatcatgtttcgggagtggctacttctccttcgacatgttgatctgaagatatattacgccgttctgacgggtgttcatgcgcaggatgacaccgctcatgccttcgaggtcctccttgaactgatccagtttgaacgagacgtaacggtcgtcgtagctgtatcctccgctggtgtcggttccggcgtcgtgacgcagttcgaggttgaggtatccctctttcttgttgtcggggtcgatctgcgtgaagtcgttgcgcacgagcaggaatttatgcttcgagaggtccgaagcgttgaatccgattcccacgttgagccagttggcgttcatgctgctgccgaaatagctggtttgcgcgtcgggtagttcctccacctcttcctgcgtggtcacgattttggtctctcccgtgtagatgttccgcgcgtcgtaaagcgcgatgttgtaatcgtaaccctcgactcccgttttcagcaggttgaagaagatgatgacgcgctggtcgtcttcgggcttgtagccggctacgcgcgatttgtcgctcggatagacggttttattgtcgtccagcacgaagtagtaatcgttgctgttgagcgtctctgccgaggcgaatgcccagctgctcgcgtaatccccgtccgagtcgttgcaggaggagaagaatactgcggtcaggaccgcaaacgtgataaatccgaatcttttcatatttttatactatttttgtattatctttcatgtcagtaaacgtattctggaggataatactgcatgcggattaaaattttttttgatcccgtgcagtcttttggtctttataccatttataagagggaacgcaaatatggaaatggaggaacagatactggccgaagggtgcagagagggggaagatacggcccggcgtgagctgtacgaccgctatgcagcccgtttgctggccgtctgtctccgttattcgggcgaccgggctaccgccgaggacctcatgcacgatgcgttcctgaagatatacggggctttcgaccgattctcctaccgcggacccggttcgctgcgcgcatggatagagcgtatagcggtgaatgtggcgctcgaatggctccggaaccggaataagctcaacttcaggacgctcgacgaaggccgggcgcttcccgacgttcccgaacccgatccgtcggaggtggcgcgtattccgcgcgacgtgctgatggagttcgtgggcgagctgcccgacggttaccgtacggtgttcaacctttactgcatcgaggggtattcgcaccgcgatatcgcgcagatgctggggatcaacgaaaaaagttcctcgtcgcagttgttccgggcgcggacgctgctggcccgcaggattgcggcgtatatggagacacattagattatgaaacaaaataaagactggacagatgtaatgcggagcgcgctccgggacgctgaggtaacacccccggccgacggatgggcgcgtctggagcgggagctgaaaactccggcgccccggatttccgtattgcgcagatattggccgcggattgctgctgctgccgtgctgatttttgtcggaggcggggaactgctgctgcatgaaaatcgtagtttgggggataaagggtttgttatcgcatcggcaacagacggcggcagttccgccgcggacaatcggacatatccggccggggggatcggaacgctcgaagagtcgcttcgggccgttgtgccgtcgcaggaggcggtgcaggccgagtcgcttccgggccgagagacccaaacccggcaggcggtgcgggcggcgtatcctgcgactgccgttgcgcggaacgctgcgccggcggtcgtggcggttgatgtgacggactcccggccgcaacccgttccggagaatgaagctgccgcaactttgcgatcggaagaaacgatcgcgcagaaacaggccgccgcagagacttccggcgtgcaggaacggacggctccgaaagaaaacgctgcatcggcgaggacctatccgagcaccacttcttattacggcgaccagatcgccttcgagcagccgaaatcccgcaggcggacttccgtgtcgctctttgcggcaggcagcgtgacgggcgggggaaccgtgtcggcggggcccggccccggcatgatgatgtccgacgctccggtaggcggcggcgccggcacgatggcccagctgaaatacaattacgacgattattccttcaaacatcaccagccgctcagtttcggactctcggtgcgcaaggaattcgcgcacggtctgtcgctcgaaagcggcgtcaattacacgctgctctgggccgacgtccgcatgaagtccagccggcaggatatcagtcagaaactccattttatcggcgtgccgctgcgtatgaactggcagtttctggatacggggcgcttctcgctgtatgcaggcgccggcggtatgatcgagaagtgcgtctccgcaaaattcggttcgagggcgatggacgagccgggcgtgcaatggtccgtgctgggcgccgcgggcgcgcagtacgatctgggcgggcttgtcgggctttatttcgagcctgaagtctcctattatttcacggaaaccgatctgcggacctcgcgtaccgactcgccgctggcgcttaccttgcggctgggcgtgcgtctttccttctgacaatccctctgaaacaagcttttgcagtgcctttcgggcacgaaatacgaccggaaaagtccgtatcttctgttgcgcggacttttttcggtcgtgtctgaatgtgctattaaaaagcttaattgtgctattttctattgtctaatggaaatttgttattatttttgttgaataatagattgtgactggagttgaataaaaaaaacacaagtgcttgaatctctgcacttgtgctttgtagtcccgacgggaatcgaacccatatcgtaagaaccggaatcttatattctatccattgaactacgggaccgggagtgcaaagatgcaaatttttttttaattattgctaaaaaaatgcgagaaaagcagaataattggcaaagaatcgaggccgtaatcaagtgggcgaacatgtcgaccaactattttgcgcgttatatcgggttggcccgcggggaaaacctttatcagatcaaacgtggcaacaacggcatatcactcgatgtcgccgaccgaatcgtctctaaatttcctcaggtggacaagttgtggctgctgacgggcgaaggacagatgttctccgacgaaaagctgcgcggcgtgcagatacctttttataatgtggatgtcgaacaggccgtcgcccatgtcgcgcacctcgaagccgagagcagcctgatggtgccgcaggccgggcagtgcgatctggcgatgtgctacatgggacgcgccatgggacccgcgctgccgcccggtgcggtggtcctgctgaaagccgtggacccggatgcgattattccggggggcgaatatgtgattgtcagccgaaaaattgtaactttgcggatagttcggctctccgacggggacgataaactccgtctggtggccggagacaaagagaattatgacgacataattctgaatgtcagcgacataaagtcggtctacaaggtaaaaggcaagttgataattaacagttgagaagtatgttttcaggtatcgtggaacgcatgggggaggtcgtggagatccgcaccgaccgtcagaacaaggattttacgcttcgcgcggacttctgcaaagagctgaaaatcgatcagagcatagcacataacggcgtatgtttgacagttgtggacatccgcgacgacacctataccgttaccgcgatgaaggagacgctcgacaaaagcaacctcggcctgctgaagacgggcgatctggtgaacctcgaacgctcgatgaaacccgatgcgctgctcgacggccacatcgtgcaggggcacgtcgatcagacggccgtctgcaccgcgaaggaagacgccgacggcagctggtacttcactttcgaataccaaccgcagggcggcggtctctgcaccgtggagaaaggctcggtgacggtgaacggcgtgagcctgacggtctgcgattcgaaggaatccagcttccgcgtggcgatcattccctatacgttcgagcatacgaacttctgccgcatcgaagtcggctcggtcgtaaacctcgaattcgatatcgtgggcaaatacatcgcccgtctcatgcaacaatatacgaagtagctatggtgtatattaaaacaaaggagggggcgtcgcttctggtcgcactcctcgctgcggtcatcgtcgccgtgacgacgaccctgctcgatgtggtctggtggatgacgctctgcgccgccgccggcgttttcgtcgtcatggctctcgtggcgctgttcatcatccgcaagtacgtggcctacaagctcaagccgatttattcgatcgtcctttcgcgcgacgtgcacaccaacgagattttttcggagctgaaggacaagcacgtcgagaatatcggcgaggagcttacggcgtgggccgataccaacgacaaggagatcgcccgcctgaaggagaccgagcagttccgcaaacagtacctcggcaatgtggcgcatgagctgaaaaccccgatcttcaatattcagggatatatctcgacgctgctggacggcggactggaggacgagctgatcaaccgcaaatacctcgaacgggccgaaaagagcatcgaccgcctgatcaacatcgtgaacgacctcgatacgatctccaaactcgaaagcaacatgaaccgcctgaagatggagcggttcgacatcgttgcgctgaccaaggagatcgccgagcaggccgagatggaggccgacaaaaaggggatcaagatttcggtcaaaggggccgaaaacctgccgtcgcctttctgggtgctggccgacaagcactatatcggtcaggtgatggtaaacctgatcatcaattcgatccgttacggcaaggagggcggacagacgcgcgtccatttccgcgacatgctcgacaaaatcctgatcgaagtcgaggacaacggttcgggcatcggcaaggaggacctgccgcgcgttttcgaacgtttctaccgcacggacaagggccgttcgcgcgagcagggcggcacgggactcggtctggccatcgtgaaacatatcgtcgaggcgcacggcgagcgtatcaccgtccgcagcgaactgggcgtgggaagcactttctcgttcacgctcaagaaagtaaatctgcaggacatcaaataacggcagaaatccatagaacccattccaaataatatgatacaaccgctaagcatcgtctgggatttcaatccggtgtttttttccatcgggtcgctcgacatccgttattacggcctgatgtgggcgctggcaatcctgattggcgccaaattcttcgataatttctgcaaacgcgagggacttccgtcgaaagtctccgagtctatattcatatacggtacgctggcgacgatcctcggcgcacgtctggggcactgtctgttctacgacccgatggagtacctgagcaggccgtggaccatcatcacgggcttccgcgacggcggcatggccagccacggcgccgccatcggcctgctgatcggtctctggctcttctcgcgcaagaacaagctgccttacgtctggtcgctggaccgcattatgatcgcggtgggtatcggcggcgccgtcgtgcgtctgggcaaccttttcaattcggagattttcggcatggcgacgactctgccgtggggtttcgagttcgtccgctcggccaaatgggtgaacgagttcgccccggcggcggtgcatccgacccagatttacgaagcgctctgctatctggcgacgttcggtctgctctgctggctctattatgcgaaagacatggcccgccgccgtccgggcattctgttcggcatcggactgatcggcatcttcctgacgcgcttcttcatcgagttcatcaagaccgagcaggaggcgttcgaacagggatggctgctcgacatgggacagtggctgagcattccgttcattctgctgggtatctatatgatttaccggggtgcgacgcagccggaggtggttcccgttgtgccgaaatccccggctgcaactgccaaaaagaagaaaaaatgagtaattatccgatggtaaacgagatcaaccgtctcgtcggcgacctgctcgccgagggcggagaggtgttcctgccgggtgtgggatcgctctatacggaacgccgcggcgcgcggcgcatttcgcggcggagcgtgttgccgccgagccgggccgtgtcgtttacctcgcaggagcggggcgtgtcgctggtcgctgaaatctccggcgccgtgcagtgcgacgccgccgaagcgcaggatgtatacgaccgctggctggcccgcacgctcgaaaacggcgtgctgacgatcgagggcgtcggcgtgctcaaactcaaacattttacgcccgatgcggcgtttgacaggcgactcaatccgcaggggcgtgagccggtgcggataaaacccgcccgcaagttcgactgggccttgtggatcggcatcgcggcgattttggtcgccctcggtttcggggggtatgagtttctgaagctctatgacgaaggcccggaggagatcgcgcagacaaccggtattccgggaccggatacaaacgccggcgccgcgccggctgacagtccggccgcgattccggctgctgcggattccggtgcgacgaccggaccggcggcatctgcgtccggtgcggacgccgcaaaggccgcgggcacgatggccgacactgcatcggggacgaacgccgaaacgcgatcggaacccgctgcgtccggagcgaatgccggcactgccgcctcgtcggttggcggtcaggggagtgctcctgccgggcagaaggatgttgccccggcgaaacgccctgaaacccgttccgcagggacggccgatgcgcccgcatcgcttgtttcgggccgccgttatgtcgtgctgggagtgttcagtacgcccgaaaatgcggcccgcgccgtcgatgcggcggcggaaaaggatccttcggtgcgctgcggaatctaccgtttcgggacgaaattcatggtttcgccgttcgaatcggccgatacggaggcatgtgcgctcttcgtccgcaattacagcgaccggtttccgggcctttggacctataccgcccgttgatgcgcatttccgagctgataatccgtttcatcgactggttctaccgcaagcccgtcgcggcgatcctgccgcggcagacgttccgttatgtcgtttgcggcggtgcgaacgtggcgttcagctgggtgtgttactttctggtttataatttcgtcctcgataaggagcagctggacctcggtttcgtggttgtctctgcgtatgtcgcgacgatgctgctgatctttcccttcacgttcttcaccgggttctggctgaaccgctatgtgacattccgtcactcgccgctgccgaccgggacgcagttgttccgttatctgctgtcgatcggcggctcggtggtcgtgaattatgtcggactgaaatttttcgtggagttctgcggcttgtgggccacgccgtcgcagatgctggcgactttcgtcacgatgatctacagctatctggccgccaaatacttcaccttccgccatgcggaggtctgacgcccctccccgatccttactctattataacctgcccggcgccgtgggagagggcgaacacgtattggtatacggctttccacgcttcgtcgcaaaatcctgcgggctttgcgtaatcggcgtaaaatacctgcccttcgtgcatcatgggacacttcgtgaaccccgccccggcatattggcgggcgaggtcctcgtggatcgtcgttttgagaatggtgattttacagcgtttcatggtgtgctgttttgcgggaatttccgttgccggtctcttccctgagtttttgcagttcgtacatccggtcgcggaatttcgccgcggcgaggaagtcgagcgacttggccgcacgctccatgtcttcgcgcgccttgacgatcagcgcatcgaggttttcgctcgcggcataagtcttctgcacgtccgccgcagccatgtaatgatcctcggcgatggggtagaccgccgcgatttccggtacgtcggtccgcgtggtcagcaacgtgctctgtcccgaaccgcttcgctgtgcgcggcgcggcagcatgccgtgctccatgttgtagcgcacctgcttctcgcggcggcggttgctctgctcgatggcgtagcgcatcgaatcggtgcaggtgtcggcatagaggatcacgttgccctgtgaatgacgcgccgcacgtcccgcgatctgcgtgagcgaacgcacgttgcgcaggaatccctccttgtcggcgtcgaggatcgccaccaatgccacttcgggcaggtccagaccttcgcgcagcaggttcacgcccaccagcacgtcgaacatgccggcccgcaggtcctccagaatctgtatgcgctccagcgtatccacgtccgagtggatgtagcggttgcgcacccccacgcggtcgaaatatttggacagctcctcggccatccgcttggtgatggtcgtcacgagcactttgtcgtcgttcttcacccgcttgtcgatctcttccagcaggtcgtcgatctggttcatcgttacgcgcacttcgagcggcggatcgaccagccccgtggggcggatcagctgctcgacgatcacgccttcgctcttcatcagctcgtaatccgcgggcgtcgcgctgacgtagatcgacgtgccctgcagctgttcgaactcggcgaaggtcaccggacggttgtccttggccgccgggagccggaacccgtactccacgaggttctccttgcgcgcgcggtcgccgccgaacatggcgtgcacctgcgggatggtcacgtggctctcgtccacgaccagcaggtagtctttcgggaagtagtcgatcaggcagaacggacgcgtaccctcgctgcggccgtcgaagtagcgcgagtaattctcgatgccggggcagtagcccagctccttgatcatctcgatgtcgtattccacgcgctgtttgatgcgctgggcctccatcggccgcccggcccgctcgaagaattcgatctgccggccgaggtcgaggtatatctgctgtacggcgccgttgatgcgctccttcgtggttacgaagagactcgtggggtagagcgtcaggttgtcgagcgaatggatgcgctgtcccgtcacggggtcgatggtctggatggcttcgatctcgttgtcgtagaacatcacgcggaaacactggctgccgaactctccgaacgccgccatgatgtccaccgtgtcgccgttcacgcggaacgtcgcaggctccagctcccgctcggtgcgggtgtagagcgcttcgaccagcttgtagaggaagtgcttgtagctgacgatctgtccgaccttgatgtcgatcgccgtggcgtggaaatccgcgggattgcccgcgccgtagagacacgacacgctcgacacgacgatcacgtcgcggcgccccgacaacagcgtggcgacggtgcgcagacgcagtttctcgatctcggcattgatcgaaaggtctttttcgatataggtgtccgtcgaaggcaggtaggcctccggctggtagtaatcgtagtaggagacgaaatactccacggcgttttcgggaaagaagttcctgaattcgccgtaaagctgcgccgcgagggtcttgttgtggctcaggaccagcgtcggccggttcagctgcgcgacgacgttggccacggtgaaggtctttcccgaaccggtgacgcccagcagggtgttgtgtttggagccgtggcggatcgagccgacgagctgttcgatcgcttccggctggtcgcccatcggggcgtaatccgatacgagtttgaaatccataggacaaaaataacgataaaatccgaaataaattgcggcctgagcgaatactcgtttaaaatacccgtattcgggccgggtgcggcgccgtcgcctttttacgggaattttgcgccgaggggcccgctcttccgctccttttcccgaattattcctatctttgcaggtatgattgacagggaaacagtagaccgcatttacgccgccgccaatatcgtggatattatcggcgaatacgtcacgctcaaacgcaagggcgtgaactatcaggcctgctgtccgttccataacgagaagaccccttcgttcgtcgtctcgccctcgaagggcgtctacaagtgcttcggctgcggcaaaggcggcaacgccgtcactttcctgatggagcacgagaacatcacctatcccgaagccctgaagatggtggccaagcgctacggcatcgaggtcaaggagaaggagatgaccgacgaggaggtgcgccgcaacgacgaccgcgaaagcatgtttgcgctcaacggctgggctgccgactatttcgccgattacctccaccacgagaccgaaggcatgagcgtgggcatgacctatttccgccagaagcgcggcatggccgacgccacgatcaagaagttcggtctcggtttctgtccggccaaaggcgaccggatgtcgaaagacgcactggcggcggggtataagaaggagtttctggttgcgacgggactttcgctccagcgcgagagcgacggatcgctctacgaccgtttccgcgaccgcgtgatctttccggtccacaatatttcgggccgcatcgtcgctttcggcggccgtacgctgcgtaccgacaagacggtcgccaagtaccagaattcccccgaaagcgagatatacagcaaaaagcgggagctttacggactttatttcgccaaaaaggcaatccagcagctcgacttcgccatcatggtcgaaggatataccgacgtgatttcgatgcatcaggccggtgtcgaaaacgtcgtcgcttcgtccggcacttcgcttacgaccgagcagatacgcctgctgaaccgctttacgaagaatatcaccgtcatttacgacggcgactcggcgggtatccacgcttcgctgcgcggtatcgacatgatcctcaaggagggcatgaacgtgcgcgtggtgctgctgcccgaacccgaagaccccgactccttcgcccggacgcatacggccgccgaactgcaggagtatatccgcgccaacgagcaggatttccttgccttcaaggccagactgctgctgcaggacgccgagggcgacccgatcaagaaggcggcccttatcggcgacatggtgcagtcgatcgcgcagattcccgatccgatccagcggtcggtttatatcaaggagtgcgcccgcatcatggacatcgacgagaacatcctcatctcggaggtggcccgcaagcgcatgtccaccacaggggaccgcgagacggacgaattcgtccgccgtcagacggcccagcggcgcgccgaagtgcgggagccggaggtcgagtttgtgaagcaggtgcaggccggcagcagcgtcgaggcgctcgaacgcgaactggtgaaatacctgctgaagtacggccactgctcgttcgacttcaaagaggggcgtacgatggtggcgtgcaacgtcgccgaggtgatcttcatggaacttgacagcgacggactctcgttcagcaacccgctgtacgacaagattctggcgacctaccgggagcagtggaagctgctcggcaccggagcggaggtgccggcgcacttttttctgaaccaccccgatccggaggtgtgcaacgtgtcggtggacatcctcacgtcggacgacaattatgttcccagcgagttgtggcggcgcaaggagattcatatcgacaccgatgccgagatgctggccgtgggtgtgccgaaggccgtgacgctctacaagtcgaaggtgatcgagggctatatcaaggagtggcaggccaaacttgccgacgagagcctgaccgaggagcagcagaacgaggtgatccagcggctggccggcttcaacaaggtgaaggtgactattgcaaggaaattgcagcggctgatcttgtagccgccggaataatatatgtggtgttttgaatttttaacgaaaaaaggggcgggtatcgggtcgtacacgtatcactacgcataccgtgtgcaaacagaaaataaacagaaagatgtgtaaaacatatcaaagataaaagaattagttaccttgaccgattcccacccctgcgaataaatgggcaattattgtgccgtttccgagtatatgagtgaacagaaaaatataaatatccgcaacaagcgcgcgacgttcgactatgagattctggaagagtacgttgcgggcgtcgtattggtcggcaccgagatcaagtcgatccgtgcgggccgggcttcgctgaccgattcgttctgctatttcgaccgcggcgagctttggatccgcggcgtcaatatcgccgagtacgcgtggggcacctgcaacaaccacacgccgcgccgcgaccgcaagctgctgctcaaccgccgcgagctggacaaactccagcgcgccggacaggacaagggccttacgatcgtgggcctgcgcatgtttctcaacgagcgcgggctggtgaagatcgtcataggacttgcccgcggccgcaaaacctacgacaaacgcgaatacctgaaggaaaacgacgccaagcgggagatcgacaaggcgatgaaaaactacagacgatgatacgggcgatttttctggatgtggacgggacgctgatcagtttcagtacgcatgaaattcccgcttcggcgcgccgggcattgacgcaggcgcatgagcgcggcgtacggctctttatcgccacggggcgcgccgcgaacgatctcggaccgctcgaaggaattccttacgacggcgtggtgtcgctcaacggcgcccgttgtgtggccaacgacgggcgtgtcgtcagcctgcatccgattccgcgggccgatttcgaacgcgctttggcgctctccgaggagcaggactttgcaatggggctggaactggaggagggcgttttcgtcaatcgcgtgacgcccgacgtcaagcgggtcgcgcatatggtggcgcatccggtgcccgaacagaccgacctgcgcgagcttttcggccgggtcgaatgctgtcagctctgcttctatttcgacgcggagacccagcggcgggtcatggccgagctgccgacactcgtggcgagccgctggtgcccgattttcgccgatgtcaatgtcgccggcatcgacaaggcgaccggaatggaggagtttatgcgcagttacggcttctcggcggccgaggtcgcggcgttcggcgacggcggcaacgacgtggcgatgctgcgtgccgcaggagtaggcgtggcgatgggcaacgcctgcgacgaggcgctgaacgccgccgactacgtgaccgcttcggtcgatgacgacggtatcgcaaaggcgttggcgcatctgggggtgatttgacggggcggcgcatgcgccggcgggaacggaagttggtgaggtaaattacaaaatcatatgagtcttattctttgtatcgagaccggcacggacatctgttcggtcggtattgcgaaagacggggagttgctttcgctgcgcgagagcgacgaggggcgcgatcatgcccgcaaggtcggcgtatttgtcgatgagcttctgcgcgagacgggtattgcgcccgacgagctggacgccgtggcggtcggcaaaggtcccggctcctatacgggactgcgcatcggcgtgtcgttcgccaagggattgtgttacggattgcagaagccgctgatcgccgtgggatcgctcgacgcgctgacggaggttgcccgcgaagattacgaagcgggtattctttctgtttccgactgggaccgtgcgctgctctgcccgatggtcgatgcccgccgcatggaggtttatgcgcaggtcttcgatgcggagggccgtccgcagaacgaggttacggccgaggtgatcgatgccggcagcttccgggaattccgggagcagggccgtccgttcgtgattttcggcagcggcgctcgcaaatgcgccgaggtgcttgtcggcgccgagttcgtcgaggtggccccttcggcccgcggtcttgcgcggctggcccagcaggcgctcgacgaaggccgtacggaggatatcgcttacttcgaacctttttacctgaaggatttcgtcgtcacgacctcgaagaaaagtctgttttagttccgttgccgacatatgaccgaagcggaactggtaaagagtctttcggagcggttctattcggacttcgcagatacggtggcccggcgggtgcgcgatgcgggggcggtggagctgctttatcgggtggcgacctcgccgtatgctaacctgccgaagcctgcgagacacaaagcggctttccggagcgcctatgtgctcgaaaagatctatttcgccgctcccgatgcgttcatgcccttcgccggagcgttctgcgacagggacttccccgcttgtacggaccggagcgcgcagcgccatttcgcaaagatcatggccgacctgctgggacgttatacgcccgattcctcttcgctggagcggatcgccgagacggcggcgcagtgggccgccgatcccggcacgaaggtcgcggtgcggatctgggccgtcgaggtgctgaaacactgccgtgagcgggtcggctgggtagcggaggcgtgggacgatcttgtcgagacgatggcgcacggcgcgacgccgggcatcgaatgccggatgcgcaagagctggaagccgggccggagcgacaaagcctgaaaaaataatccgggattaattcggacccgggatgagtccggagcatgtaatacctcggaaaacaaaaatccccgtgaacttgcttcgcggggatttttgttgcggtatgtcgtccggttatttcacgctgccgatcacggccttcaagcgctgcttgaagttgtcgccgataatggtcatggaatcggtcttttcgaacagtgcggccttgttcttcgcataggctccgatgaattcggcgatgcggaacggctcttcgaggatgaagttggggcactgcgaaacgcgcaggtactcttcgggcagcatcaggtagggttcgctgtgggcgccctgctcggtcttgaattcgacggtcaggtcgagacagcgtttgaagacgccgctcatgccgtacaggtcggcctgatgcgccgtcgcatagtcgtcgaacgcgagttcgatctccaccggagcgtcgcaggccgtcgtgcccgtgtagatcaccggtgcgagcgtgtagccgtcgtaggtccactccccggccttcggaaagcgcgagtaggccagttctttgccgttgacctttacagacttgggcgggaagacggccgggaagcgcagctcgtagctgcggttgtcggacgcgcccgcaaacgaaccctcgcggggcgaaatgcgtacgcgcaccgtgttgccctcctgctttttgctgactgttgtcaccgcgtagttcgtcttgtactgctggctcatgccgtcgtcctcgtagtggcgcagctgcccgtcgccgcccggaatgaaggtcagcaccagcgtatcgcacggctgctggaggttcttcaccgtagccgggttcatcggaatgatcgaacctgcttttgcataatggggattctccgccagcgtgtagtgcaactcttcggtgcggccgccttcgtacatcgagccggtcgcgcagtcgaaccacgccccttcggggaaccagatcgtgcggggggccagacccgttatgctgtccaccggctgggtgatggtcgtggcgagaatgtcgttgccgaacatgaactgttcgggcgtctcgtacgccttgtccgattcgggatagtcgtagtacatcgggcggcacatgccgacgcccgtgtcgtaattctcgcgggccgcattataaatatagggtgccagcgtgtagcgcaggcggatggcgtcgcgcatgaggaacatatggtcgggaaagcaccagatgcagcgttcgatgcgcgggtctttggtcgaatgggttttgaagatcggagtgaatacgccgtattgcagccagcgcgtgtaaagttccgggtcggtcgccttctgtgtcttgtggaacatgtggccgccgatgtcgtggccccaccagccgtagttgacgttcgaagccgtagccgtgaagtagggcaggtaggcgagcatgggccatgtggcgtaggtgtcgcccgaaaatgccagcggatagcggtggctgcccagcccgccccagcggtggtagatgaaggggcgcagtccggggttctgacgctccgcatggttgaagaaggtgtggttgagccagaaggtgttcgacagtccgggggtgtatttcgactctttccactgctgccagtcgagccaccagaagtccacgccgtcgcgttccatcggttcgagtacggttttgaaataggcgtcggcccatttccgttcgtcgattttgaacggtacgctcttgcctttctcagaccatccgtattccttggtaaagtcatcgtatacagcctcgtaaggttggatacctgaagcgggatggaggttgagcgccaccttcagctcttcgttctcggtccacttgaggaagttcgcgggcgaggggaacagctccttctgccacgtgtagcccgtccagccgatgcgctgaccgtattcgtccttcggcgaattgctcttgcgcaggccccatgtctcgtgccagtccatatcgacgatcagcacgtcgatcggcacgtccatcgacttgagtttgttcaccagatcgacgaattcgttgtccgaatactgccagtagcggctccaccagtagcccagcgtatatttcggaggcatcggcgcgcggccggcgacgagcgcgtagtcggccagcgcctgtttgtagtcgtgtccgtaggcgaagaggtagaggtcctgacggtcgccttcgggacgcgcttcgatccactcttcccattcggaaccgtcgggcgtcagcacatgacgctgcgaatcgtcgatcagggaccagcccgcgcgggagaggatgccctgctccatcggctccttgagtttcgaaccgtcggcgccgtcgagcgtgcgggtcgtgcccagcaggttctgcggattttccatgccgggagtccagaccacctccttgccgttgagcgtgaatacggctttcaggtttttgtcgctgaacttgccgttcttaagatacgtaagcgtcagcgccggggtcgtgatcgtgagtttcgatttgctttcgcggaccttgaattcgggaaccggagtctcgcgattgacgaacgtcagcgtcgcacggtcttcgaattgtccgtcggcactccactccatacggatcaactgcggtgtgagcaccgtaaaccgggcgtttcccgaagttacgacggctttggcgtcggccttcgggttgtctgcgattgcaggcgacagcgtgcaggcgagcgctgtcaagaggacaagaaatcgtttcatctttatttgattagcttggttaccgggtaaaggtacgcaattcggaacgaatccgcaaatatttttctttcgaaacgaaaattattggtttcggaaagcaagttttgccggagggctattgcgccgtcgtatcggtcgcagcggctttcgccgcggattttgcagcagtttccgccgcggattccgttgcggagagggccgccgggtcttcgtcggctccggcgatttcgagcgtgcgggccgaatggcgtttcttggtttgcaggctcgccgttttgcgcagccgttccccgacgcggacgatgttgtcgttgcccgtgcaaagccgcttgtgggcgtcttcgtatgcgtcgcgggccttgtcgagcgcggtgccgaccccttcgagcgaagaggtgaaggctaccagctgttcgtagagtttcagtccgcaggcggcgatctccttggtgttcttgtcctgatcgttgtatttccagaggtcggccaccagcttgagcagggcgaagaggttcgtcggcgaggagacgatgactttccggtcgtaggcgtccgcccagatcgccggatcgttctgcagggcggcgaggaatgccggttcgttgggtatgaacatgatgacgaagtcgggcgagttgagccgccgctggtactccttgcggcccagctcggcgacgtgctggcgcaccgaggccacgtgcgctgcgaggtgacggcggcgctcctcctcgctttcggccgaggtgtagccgacgaacgccgtgagcgaaaccttcgagtcgatgacgatgtccttcttttcgggcaggtgcagcactacgtcggggcgcaggttgcggccctcctcgtccttgatgttgtattgggtctggtaatgtatgcctttgatgagggccgagctgtcgaggatggtttcgagcagcatctcgccccagtctccctgcaccttcgagttgcctttcagcgcgttggtgaggttggtcgtctcggccgtgatgcggcggttcagctccatgaggtttttcagctcggctttcagctcgccccgctgcgaggtctgcgtggtgtagatctcttcgacccgcttgcggaagtcggtgatgttgtcgcggaagggtttcagcagactgtcgatctgctcctgactggtttggcggaagcgcaccgagtgttcgcccagaatttcggtcgcgaggtttttgaactgcgcccggaaggtctcctccagcttttcgcgctcggccttctcggccgcacgctcctcggcgtttttcgcccgcagcgacgcgagttccgtctcggacgaggcccggagcgccgccaactccgcttcggtgcgggtccgctgttcggtcagtgcttgtgcctgcgcttcgtaccgctggcgaagctccctttcggccgacacggcctgctcggctgcggccagccgggcttcggcggccgaaagacgggcggcggcggcgcgttcgcgcgcttcggcgtcggcgttcgacgcgccgagacggcgggattcccggtgccagagcagcaggacgatggcgaggatggctgacaggcagcagattgtcagtatgaaaagcgagatcggggtcatggcttgtgcggtaatctattccatgcaaaaatagcaatttattcccggaaaacgagccgttcggagcgcatgcggaatattttggcgccgaatgcgaatttatttgcctgaaacagcgtgcggtttgccgattttttatagttttgttccttaatcggattcattttaaatttgaagcatatgaagaatttcttacgacctttgaagctggtctgccttgcggcggcgtccatgctgattgtttcctgcggcagcggcgcggattaccgcagcatcctgcccgcagactcgtttatgaccgtgtcggtcaatcccgcatcgctgatgcagaagtgcgaagccggcgatttggaccagcatccgctttatgtccggatcaaggccgaactggataaagaccagaacctctccgccgaggagaaggagtacctgctcgccttgttgaagaatccgggcgaatcgggtatcgacgtgaaaaaggatttcttcttctttgcggcgatggaaggcactgtcgatgctcccgttatgcggggcggtctgctgctgccgatcggcgacaaggccaaattcgacgctctgcttgcgcggatcaacgaaaagagcggtgtcgcgcccgaaaccaagggcggcgtttcggtcgtcgatctgggtaaagagggcgatgccggcgttttgtgcgcctacaacgacatcgcgttcatggtctatttcgtgcagaacggcgttgacgatctggccggcgacgtgcgcaagctgttcgcccagcagagcggcgagagcctgatgggcgacaaggccgttgcggagcagctcgcccggaagaacgacgtcaacatggtgctttcgtacggtgagatactccccatgatgaacaatccgatgctcagctcgatgcccatgatggatgcgctgaagggggcgacgatggtcggttcggtcaatttcgagaagggccggatcgttacggaggccgccgtgtcgtacaaggacaaggagagcgaagccaagatgatggatttctatgcctatgtcaagccccagaccggagcgctgctgcgctatgtgccggccgcttcgatcggcgcgatgtcgctgggactcaacggagaaaagctctattcgatgctttcggcgatgcccggttacggcatgctgatggcaaatccgatggtcaagcaggtgatggaacccttcgacggcgacttcctgctttccttctcaggaatgggcatcgacggcaaatatcccgtggcgtcgatgctggcgcaggtgaaagacccggccgtgctgcagacgatcgtcaccaacttggccggcatgccggttcagcagaccgccgagggtgaatacacgttgaacatgggcggcgtgacgatcctgttcggcgtgaagggcgacgtgctctactgcacgaccgacgcggtcgtgaagatggcgctcgacggcggcgaaatcgcgtcgatggagtcgatggataagattttcaaaggtcagtcctcgaccttctacctcgatttcgaggggctgaacgcgatgatcgcccaactgctcggcggcaatgtcactccgcaggcggaagcggcgctctccgtgctcggcatgttcgacgacatggaagcctatggtacgatgaagggcggcacgatgatcgtaaacatggtggacaaggagcagaactcgttcaagaccatttgcggcaagaccggcgagctgattcgtcagtacgtgccggaagcgaatttgtaatatccgtggaaacagagaaaagcggccgtcctcgaagaacggccgcttttcctgaaacagatgatgtatggagtcgattactttgcagcaggtgctgcctgacgcctttgcgggcaatccggagccgccgaaatcggacttgtggctgcatgacgtgacattccgcaagggggagtattatctggtcgaagccgcttcgggaaccggaaagtcttcgttgtgcagttttctgtacggggccagaaccgactatgcgggccgcatcctgttcgacgctgcggactgccggacgctttccgtggcgcagtggggcgaactgcgccgccggtcgctgagcatgctctttcaggacctgcgtctgttcggggagctgaccgtggcggagaatctcgcgctgaagaacgaacttacccactttttgacaccggaccggatcgagcgcctgctcgaagctgcggggatcgccggcaagcgggatactccggccgggaagctctcgttcggacagcagcagcgcgtcgcattcatccgctgtttgtgccagcccttcgatttcatcctgctcgacgagccggtgagccatctcgacgccgccaacggggaggtgctctcggcgttgctgctggagggcgcgcaggcgcagggagcgggagtgatcgtcacctcggtcggcagtcggctccggctgccgtaccataaaatctttacgttatgaggttgctttggaaattgctgcgctgtcatctgagcatggcccagaccgtcggattcactctcgccggattggtcggcatggcgatcgtgctgacggctttgcaggcataccgcgacgtcctgccggttttcgaccggcccgattcgttcatgcggggcgattatctggtgctgtcgaagcaggtcggggcgcttcaggcgatcggactgggcagcagcgactttacggctgaagagctggccgacctgcgggcgcagcccttcgtgcgcgaagccggggccttcacgcctgccgattaccggataaagggaacggtcggcatgggcggcgtggagctttcgacctacctgtttttcgagtcggtgcccgaccgcttcctcgacgtcggggccgaaaattgggattacaaggccggggacagggacatccccatcatcattccgcgcaactacctgaacctctataattacggattcgcccggtcgcagggactgccgcagatatcggaaggcatcttccgccgggtctcactcggcatcgagattgcgggtaacggacatcgggagcagttccgcgggcggatcgtcgggttgtccaaccgtttgaatacgattctggtgcccgatgcgttcatccgctggtcgaacgggcgcttcgggagcggagccgcgaaacagccggcgcggattatcgtcgagactgaccgtccggtcgatgcggccgtgacggattacctcgcccgcaagggctatgaagccgagggggaccgccgggacgacggcagggcggcccgtttcctgcggatcgccgcgggcggcgtggccggcgtgggactggtgttcagcgcgatgtcgttctatatcctgatgctgagtatcttcctgctgttgcagaagaacagcggcaaaatggagaacctgctcctgctgggatatgccccctcccgtgtggcgcgcccctaccagctgctgacgctcggactgaatctgggcgtgctgtgcgtggctctgctggcggtgtggctggtgcgtctctgctatttgccctcgctggccgccctgcaggaggattaccggcctgcgggattggggcttacggttttgtgcggcgttgcgcttgcgcttctgctttcgttgttcaacggggcggcgatccgccggaaaatcaatagcctgaatcgggtgaggcgctgaggcgcggcagtccgggcggtttgtccggaaacgcatggccgcagagcctgccgaattgtatattccgcggcgcaatcccgctccggagtgcgggaatctgcgaaaaatgactatctttgtctgtagaacacgatattaaccgagcaatgaacagaatagtagcaccttcgatgctgtcggccgatttcggccatttggagcgcgatacgcagatgatcgaccgcagtgcggccgaatgggtccatatagacgtgatggacggtgttttcgtgccgaatatctctttcggatttcccgtgctgaaagccattcgcaaggcgacggcgaagtgtctcgacgtgcatctgatgatcgtcgagccggaacgttacgtggcgcgcttcgccgaggcgggcgccgacgtggtgacgttccattacgaagccacctacaaccccaagggatgtatcgaaatgatccgcaacgcgggtgcaaaggtgggggtgtcgatcaagccggccacttcggtcgaggtgttgcgcgacattctgccgcagatcgatctggtgctgatcatgagcgtcgaacccggtttcggcggacaggcgttcattcccgcgtcgctcgaaaagatcgcgcagctgcgcgcattggccgacgagctggggacggagacgatcatcgaggtggacggcggcatttcgtcgcacaacgcgcacgaggttttcggagcgggcgccgacgtgctggtggccggcaacgccgtgttcggggccgaggacccgcaggccgagatcgtgaagatgctcaacgcctgacgtgccgtccggtctcttcgtcgagtagcagccgcagatcgcttagcagtgctccgtcgtcgaagtattcgcttccgtaggtgaggttgaatgcgtaatcgaatccggcgggattggcgccctgattgtgctggatgatcgtttcggccttgtcgagggccttcacccagcgtgcctccggcgtctggcaggcttcgtactcttcccatatttcccgtattgtggctcccgcttccggcgggagcagtcgtgtcagccgctccatggccgccagctccgaggcggctttgactccgggcgcggtctgcgcaatggccggaacgtcgccgtcgaaggcttcgcccagatcgtgaatcagacacatcagcaccacccgttgcatgtccagttcgggccgctcgccggtcagcacggcggccagcagcgccagccgccacgagtgttcggcggtgctttcgtgccgtccttccgaggtgtaggcggtgcgcagtacgtttttcagccgctcggcttcgcggatgaagcgcaggtatcggatcaatttttccatgacagacttcgtttcggatttcaaagatagcgaaaaccgggagacaaggcggaatttatttcgggcttctccggggagtatcctatcttaggacttgcaaagatagcgatatgtcggattaaatcattaactttgcggtgattttacagatgccatgatttcgttagacaaccttactgtaagctacgggggctggaccctcttcgacaatatctcatttctgatcaacccgaaggaccgcatcggtctggtgggccgcaacggtgcgggaaaaaccacgctgctgcgcatcatcacgggcgaacagcagcccacgtcgggccatgtgaccctgaacggcgaatgtacgatcggctatctgccgcagacgatgcgcgtggccgacaccacgacgctggccgaagagacggccaaagccttcgatgaggtgctgcggctggaggcggaaatcgcctctctgacgcgcgagatcgccgaacgcaccgattacgaaagcgccggatacgaacagcttctgcatcgtctgaacgacgcgcaggaccactaccatatcctcggaggcgacacccgcgaagccgacatcgaaaagacgctgctgggcctcggattcaagcgcacggatttcggccgcgccacgagcgagttttcgggcggctggcgcatgcgtatcgagctggcgaaactgctgctgcgccgtccttcgatctttctgctggacgagccgaccaaccacctcgacatcgagtcgatccaatggctggaggagtacctgaaaaactacaacggggcggtgctgctcatctcgcacgaccgcgcttttctggacaacgtgaccaaccgcacggtcgagttgtcgctgggcaaggttaccgactacaaggtctcctattcgaaatacgtcgtgctgcgcgccgaacgccgggcgcagcagatggccgcttacgagaatcagcagcggatgatcgagaagaccgaagagttcatcgagaagttccgctataaacccaccaagtcgaatcaggtgcagtcgcgcatcaagcagctggagcggctggagcggctcgaaatcgaggaggaggatctttcgacgctcaacatcaaattcccgcctgcgccccgttcgggacagatcgtggccgagatcaacgaggccggcatgtcgttcgggacgaagcatgtcttcagcggtgcgaatttcatcatcgaaaagggcgacaagatcgcgctggtagggcgcaacggcgagggcaagaccacgctggcgcgcatgctgatcggccagctgacgccgaccgagggttcggtgcggctcggtgccaacgtcaatatcggttactacgcccagaatcaggacgacctgatggacggcgaatttacggtgtacgatacgctcgaccgggtggcggtgggggatatccgcacccgcctgcgcgatattctgggagcgttcctgttccgcggcgaagacatcgacaagaaggtcaaggttctgtcgggcggcgagcgggcgcgtctggcgatggcccgcatgatgctcgaaccgcgcaacctgctgattctcgacgagccgacgaaccatatggacatgcgttcgaaggacatcctgaagagtgccatcatgaagtacgacggcacggtcgtggtcgtttcgcacgaccgtgaatttctggacggcatggtgcagaaggtctacgagttccgcgacggcggggtgaaggagtacctcggcggtatctattacttccttgaaaagcgcaagctggaatccctgcaggagatcgaacgccgcgacgctccggcaaaaccggcggcgaatcccgcggcgaaatccgccgcgcagcccgctgcgaacagggacgccgcggcgtcggggaaactgacctacgagcagcgcaaggagcaggagaagcagctccgcaaactgcgccgggcggtcgagacggtcgaagcggagctggccgaaatcgagaagcagatcgcggcgtatgatgcgaaattcgccgccgcgaccgaatacaacgaagccgactacaaggcttacaacgacctgaaagcccgctacgaccaccagatgcacgagtgggagaaggcgtcgtacgaacttgaaatagtcgaagagcagggatagcctgctcggccgcatctccggtgtgcgggataggcgattggaaaacagtaaatcatacggatatggacaatatcattttcgggatacgtcccgtggccgaagcgatcgaggccggaaaacagatcgaaaagctctacatccgcaagggcgccgaggggcagttgatgtcggagttgagagacctctgcttccggcataaggtgcgtgtgcaggaggtgccggtcgagaaactcaaccgcctgacgcgcggcaaccatcagggcgtcgtggcgcagatctcggccatcgaatatgtcgggctggccgatattctggagcgcgtgcccgaagacgaaacgccgctggtggtgattttcgacggggtgaccgacgtccgcaacttcggagccatcgcccgctcggccgagtgcgccggggcgcacgggctgattacgccgctgaagaattcggcgccggtgaacgccgaggcgatccgctcgtcggcgggggcgctgacggcgattccggtctgtcgcgtgggttcgatccgcaatacggtcaaactgctgcaaaccgagggattccagatcgtcgccgcgaccgagaagagccgcaaactgctttacgacgccgatttccgcaagccgacggctttggtgatgggcgccgaggatacgggcatctcgaaagaggtgctgaaactctgcgacgagcagctggcgattccgctgatcggccatatcgagtcgctgaacgtctcggcggccgccgccgtgatgctgttcgaagcggtgcgccagcgaattgccgaataattcatcgaaccgtataattgaccgaagaccatgaaagcgaaactggaacgttatctgcgctggctccgggaggggtttctgcagatgctgcgcctgcatcccgtcgagagcgcgcttactgtatacgcctgcgccggatgcctgctcacctatgagttggattgggaccactcccttccgaaactggccctcgcggcgttgtttttcgccgtcgcgctggtcgtcaataaccttgcgggccgcggcccgtggcggcgcgtctactgggtaagctggacaccgatcgtcccgctgtcgctctggggaggactcgaagcgtggatagtctcggagccggctttcctgaccttcggcatactggtcccgctggcgctgctgatgtgccgccgcgccgtgcacaacgaacgtttcgtctgcgacgcgcttttgtggctgcggtcgggcgtgctggcggtgttcttcgccaatgtcgccctcggactgttcggggcgattctcttctccacgacctatatcttcgggctggagggggcgtggatcgaccatgtgtggacctatgcgctgatcgttttcgagaccttcgccgtgccggtactcttcctgatgatggcggaccgctggcgggaagccgggtacgagagcaaccgcattctcgaaatcctgctcaactacatcgtcgctccggcgctgctgatctatacggccattctctacctctatatggccaaaatcctcgttacgtggtcgctgcccgaaggcggcgtcgcctatctcgtgttcggattcacgcttttcgcgctggccgagaaggcgctgcagttcctgatgcggaagcggctttacgactggtttttcgaccggttcagcctgatctcgctgccgacgcagctcctgttctgggtcggtgcgattcgccgtacgagcgaatacgggcttacctcgccgcgtatctacctgcttgtctgcggcggtctgatgaccctttgcgtggtgctgttcctcttccggcgcgcgggacgctatatgtatgtctgcctgacggctttcgcggtcttcgcggcgttcgcttacgtgccgtcgctcgaacccgaacggctggccgtgcgctcgcaggtcggccgcgccgtccgcatcgccgaatccctcggacggctcggcgacgacgggcgtttgatcctgacccccgtgccgccggctgacagcgtatatcgggaggcctatcacggactttatgaatcgctgaagttcgtcgagaggcgcgatactgcggtctttgcccggttcgggaccgacctcgacgggtttgccgcgattttcccggagcggatgcgcagctacgtgaggtggggttacgattactgcaattcatattgcgtcaataatatcatcgagctggaagcgcctgtcaatgcccggttcgaggtaaatgccgaatatccgcattactatatgaatctccggggctggagtgacagcagctatcatttcggtggtgatacgctccggctgtttctgggcgaggagcgtgccgtacaccggattccctgccgggaactgctcgaacgccagctgaaagagagcggattcgaaccctccgaagggtgcgagccgacgtccgatcagctgctgcggctgctggactaccgcgacgaccgttgccggattctgttcgagaatatcaggttggaacgtacggattcggccgttgtgatacagggcatgtcgatcaacgcagtgctgatgcgatgatttcgaccgtgacgcatccccggctgggcgaggtgactctttcccggacgcggcgcgcacgccgcatctcgatcagcgtgcgcggtacgggggctgtgcgggtctcttttccgtacggcgtttcggtccgcagggccatggagttcctcgacctgaaggccgactgggtcgagcaggcccgcgtacgtatggcggcacggatgcctgcggaacccccgcttccgcccgccgaggccaaagcccgcatcgaagagctgcgccgggccgccaaagccgatcttccggcgcgtatcgagcggctgtcgcagctgacggggctgaaatacgccaagctcacgattcgggcttcgcgtaccaagtgggggagttgttcggggcgtaataccatttcgctgagcctttttctgatgaccctgcccgaacacctgcgcgattacgtgatcgtccacgaactctgtcataccgtccaccacaaccattcgccgcgtttccatgcgctcgtggaccgcatggtcgggggcaatgaaaaagcccttaaccgtgagttaagggctttcgcaattcgttgagtctcggcagtcctatttctggccgagtatctccttttcacccttgtaggtgaacgccatgaatacgatcgagaggaagcaggccgcgatgagcaggataaacgtccagtcccagcctgcggcttcggccacggagccgatcacgatattggccagaatggccgtgccgaggaagtaaccgaagaatccggtcagtccggcggccgttcccgccgcgtttttcggagcgaggtcgagcgcctgcacgccgatgagcattaccggaccgtagatgaaaaatccgatggcgatcagcgacatggtgacgatgaaatagttcgacgagaactgccagtagaggaagatgaataccgcgacgatcgccatgaagaggatcgtgggaacggcgcgccgtccgtggaacaccttgtcgctcagccagccgcagatcagcgtgccgggaatggcggcgaactcgtaggcgaagtaggcccagccggcctgcttgatgtcgtaaccctgcgcgtcgcggaggtaggtcggggcccagtcgagacatccgtagcgtaccatgtagacgaaagcgttggcgatagcgatgaaccacagcagtttgttgttcaggacgtatttgaagaagatttcgcgggtcgtgagcacttcctcctgcttggcgctgtaatttttcgggtagtcgttgcgccatttctccaccgagggaaggctgcacgactgcggcgtgtcgcggatgagcacgtaggcgaggatggcgatgaagatcgcgacgaccgccgggaaaagataggttcctatcaggaaatagagttccgtgtggctgccgcagaaccatgagccgaaccagatggcgccgtagacggccatcgggccgaccaaagccccgcctacgttgtgggcgcagttccagatcgacatcttcgtgccgcgctccttgatcgagaaccagtgggtcatgacgcggccgcacggaggccagcccattccgttgaaccagcccacgaggaagttcaggaccgccatgatgaagatggccagccgcttgtgctccgggccgagcagcgtaaccggaacgatcatgaacatcatcgacagggcggccagcaccagtcccagcggcaggaatacgcgcgcgttgctgcggtcggagacgcttcccatcaggaatttggacagggcgtaggccacggcgttcatcgccagcacgatgctcagttcgctctggtcgaagccgagcagggcgagctccgggatcgccatcgagaaatttttccggacgatgtagaatccggcgtacccgatgaagatgccgagaaacacctgcagacgcatgcgtttgtatttcgcatcgaccttgtcggcctccatttccggtttataggcagggggttgaagaattttccacataattgacgtggggctcgacgcaggaacccgattgagttgaagttggtattggttcattcatggcgacgtgcgtccctgcgtcggacccgcgtcggggcgttcggctacgcccggtcattttccaaatcctcccgaatccctcctcgcggagaggagaaattcgggattcttcggatttgttccctataaaagttgtttcgttcgttcggaactccgttcggcctaagcctcggcttcgcctgcaaagatataagttttcgccaattccgtgaaatcttttacctgcccgtcgatccatgcctgatcgcgtccgagttccttggccatgagttgcgccaccttcggagccgcggccatagcttcgcgggcgtcgacgaagagcaggcgtacgcggcgcgaaagcacgtcttcgaccgtcatggccatctcttcgcgtacggcccagagtacttcggcataggtgtagccgtacttcggtgagagtttttcgcccaattcgggctgctgcttgataagctccagaatcttcggctcgtcgctgccgtatacgtacatgtgatccgtcagatcgggattcttgcggtaaccgtggatgtgcagtttcttggtgacgcacttgcgggccggaagtttcgcgacttcgatcgccttgtccaccgtgtcctcggccatcagacggtacgaggtccacttgccgcccgtgatcgtaaccagaccgttgtccgatacgatgatcttgtggctgcgcgaaatctccttcgtgttcttgccctccttcttgggcgccgccagcggacgctggcccgcgaagaccgaaagaatatccttgtaggtcggagccgggttcatgtagagtcccgccgtgccgaggatgaagtcgatctcctccttgagcgggcgcgggtcttcctctgccttggggcgtacgatgtccgtggtgccgacgacgactttgtcgtgccaaggcacggcgaacagcacgcggccgtccgaggtcttgggaaccatgattgcgtagtcgctctgcaggaacttcatgtcgagcacgatatgcacgccctgactcggcgtcaccattctgcggtgcgtcgggctgtccatgtgcatgatgtcgtccacgaagcagccggcggcgtttacgacgctgcgcgctttgagcgtgtgctcctcgccggtgaggttgtccacgaacttcacgcctgcggcgcggcccgccgcgtcatgcacgatgcccgtgacggtagcctgattgacgaccgtgccgccgttttcgacgcaggtctgcgcgaggttcacggccatacgcgagtcgtcgaactgtccgtcgtggtacaccacgccgcctttcagacccttctcgaccgaagtcggaatgtatttcattacctttttcgccgaaatgtatttcgaacgtccgtagccgaaaccgaacgaaagcatgtcgtagaaggtcagaccgcagaaataaagaaaattatcccaatacctgtagttcgagatcacgaaggcttggtctttcaccagatggggggcgttcgccttcatgcggccgcgttcgcgcagcgcttcgagcaccagcatgacgtcgcccttctgcaggtagcggacgccgccgtgtacgagcttggtactgcggctcgaagtgcatttcgcaaagtcggttttttcgagcagcgccacgctcatgccgcgcgtcgcggcatcgacggcgacgccgagacccgttgcgcctccgccgaccacgacgatatcccaaactttgtctttttcggatagttttttgatttgtgcaagtctttccatagttagtgaatttcgtttcgcaacaaaattacatatgattttttgtatttcaaaataaaatatgttttatttcataatattccgtttcgatatgcttcctttgcgcaagaatggttatttcttctgcccgtttcggcagatttcgaattatttttcttatcttgcattacgaaacgattaaactttactcacatgaacaaatccggcgaagagactattttgagccttccggaacgtcataaccggattcttgcgctgcttcagcagaacggctccatctccgtggcccagctggccgaactgttcaaggtctcggaggtcaccatccgcaaagacctctcctatctcgaacaacagaaaaaattgtaccgaactcacggcagtgcgattctgatcagtccctatatcagcgaccgccatgtcaatgagaaggaaaaaaagaacgtcgcggagaagcgggccatcggcgccaaggccgccagcctgatcgcgcaggacgattcgatcatcatcgcgtcgggaaccaccatggcgtttctggcgcgcgaaataaagcccgtaggtcacctgaccgtcattacggcggcggtgcccgtcacttcgatcctttcgcaggacgccaacatcgacgtgattcagctcggcggcatcacccgcagcagttcggtgtcggtcgtagggcctttcgccgaacagatgctccgccacttcaattgcagcaagctgttcgtgggcgtggacggcatcgatctggaattcggtcttacgacgaccaacatgctcgaagcgacgctcaacggggcgatgatgaacgccgcccagaaagtgatcgtgctggccgacagttcgaagttcggccgtcgcggcttcagcaagatctgcgatctggaggctgtagaccgcatcatcaccgacagcggcattcagcccctttacctcgaacggctccgcgagcgcggaatcgaggtgatcgtggtcgatgcctgacgagcctttcggcaacttttccatgatcgtatgattcgttaaaacaaaaaacaaccgtgattttcacggttgttttttgttgtgtttgaagaacgcttgatggagtttcaggagataaggtgcatatattcggcgattcggcatgcttcgatcgaagtgtcggccttcagcttgctcaggatattctggcggtggcggttgacggtatggatgctgatggagagcagtatggctatctctttgctcattttgccggcactgattaattgcaggacctccttctcccggtccgacagcaggttgtcggaccggcgtgtttcgggtgatattatttcgcccgtggcagaattgacgaacgtgtaatccggctgaaccgtgcagaccgagtcgtagagacagagcgccatgcgcaggctgccgttcggggtgctgccgatgtagaacatgcggtggcggatcgggacgtagatgtctgttgcatcacgcatgcgaatttgcccggagacatagtagttgactcgctccgcaatcgggatttcttgcaggaatccgaaaaagcggagttcctgcgtgtgtttttccagcaggtcgtcgggatgtattcggtcgaagattttttcttcccagatcgaagcaatcgtttcttcggtagtgtgttcggctagccccagccggaccgcggttctgccgttgtaaatacggctcgtattcgattgcaggtcactcaacacggccaatgcgttttccgtccgcacgtatgcaagtgccgtctgcctgcactcctcccataggagggcttcggagtgttcgtcgtcgaaattctgacgtagcagtttttcgttcagtgtgcttacgatattcatagtttgggaatggttactaatcagtattgctccggtcgttgggatgccgtacctttgcaaaggtaatttaatcatcaaaaaatccgaacatatgaggaaaatacttttggcttgcttggctttggcggttgcagaagtcacatgcgcccagagtcttgaaaagattcaatggttcaacgagccggaacggtggacggccgaggacggaattcttacgatgcaggttccgccgcattgcgactactggcgggtttcacattacggtttcacggttgacgacgctccgttctgttatgcgacctatggcggggagttcgaagcgaaagtgaaagtgacgggtgattacaaaacccgtttcgatcaagcgggactgatgctgcgcatcgatgccgagaattatattaaggcgggcgtcgaattcgttgacggaaaattcaacctcagtactgtcgtgactcatggaaccagcgattggagcatcattccgcaggatggagcggttccgtttgtgtggatcaaggccgtacggcggctcgatgccgtggagatattctattcgttcgacgataaggagtatgtgatgatgcgaaatgcatggctgcaggacaacaccccggttatggtggggcttatggctgccagtcccgatggagagggattcgaagcgaagttcgaaaacttttctgtaaaacatctgcccgatatgcggcgaatggaatggttgaagcggaatgccgaataaggcggacgggctggaagttggctcgtaaaacaggagcggtccgggaaaaccggaccgctcctgttatatataaggccacaattgttatttcagcagcgcctgcaggcgttcggggtaatcggtggtgatgtagtccacgccgaggtcgatgaagtagcgcatgtcctcctccgtgtccacggtccagacgttgacttcgaggccctctttatgggcctgctccacccacttgggatttttgcggagcacgctcatcgagtagtcgataccggtcaggccgagttttttgatgctgcggggagccagatcgccgttgaggtagaagatgcggccgtcgggcatcagcttcttgaacgcaagacaggcattgatcgagaaggcgatgatgtccgtgcggtcgagcaggttgtatttgcgcagggctttgatgatcttttcagctgcgagatcctcgcgcttgaggtccgaaagcgacttcatttcgaggatcaggcgcgtattgggcttggtggctaccaaacgcaggtaggcgtcgagcgtcggaatgttctcgccgttggggagcacgatcgaggtgatctccttgagcgtcgatttctccatattgatgtcggtgcccttgtagacgcggtcgtggttgacgatcagcttgtcgtcggccgtgagccatacgtcgatttccgagccgaaaacgccgaccgaatcggccttcgtgaacgaagccagtgagttctgggccgaattgggggcggtccaatagccgcggtgcgaaattactttgggttgtgcggcgaccgcggcgcttccggtgaggagcatggcggctgcaaggatgagttttttcgtcatatcgtttgaaatgttggttgagtgcttataaaacgaaactttcacaaagttagaaaacatttccggaataacaagctgaaagccctgcaaagcgtaatttttcgtaatgatcggccgctttggtctctttcggtgcattttgaaacgaaactgaaaatgacgaatagatggatttttcggtcggaaaatgctggaaattcaggattttttttctatcttcgtatgatgcagagacgatttattaacttaaaaaacttcaataaccaatgaaagaaaaagtcagtaagaagttcggagagctttacggctccggggctatcctcttcgcttcgccgggtcgtatcaacctgatcggcgagcacacggattacaacgggggcttcgttttccccggcgccgtcgataagggtatcgtcgcggccatcaagctcaacggcacggacaaggtgcgcgcctatgcgctggacctcggcgaaagtgcggagttcggactggacgaggcggacaaacccgcccagagctgggcctgttacatcttcggcgtctgccgcgagattcagaagcgcggcggcaagatcggcggcttcgacacggtattcgcgggcgacgttccgctgggcgccggcatgtcttcgtcggcggcgctcgaatcgacttacgcttttgcgctgaacgatctctacagctgcggaatcgataaattcgagctggcgaagatcggccagtccaccgaacacaattactgcggcgtgaactgcggcatcatggaccagttcgcttcggtgttcggcaagaagggcaacctgatccgtctggactgccgctcgctggaatatgcctatttcccgttcgatccgaaaggctacaaactcgtcctgctcgactcgcgcgtgaagcacgagctggtggggtcgccctacaacgaccgccgcgcgtcgtgcgagcgcgttgccaagatgctcggacaggagttcctgcgcggagctacgatggagcagctcgacgccattaaggataagatttccgaggaggattacaagcgcgcccgctatgtgatcggcgaggagaagcgcgtgctcgacgtttgcgaagcgctcgaaaagggcgattacgaaactgtcggcaaacgcatgtacgaaacccactggggcatgtcgaaggactacgaggtatcgtgcgaggagctggacttcttggcggaggtcgccgaggcgtgcggcgtcacgggttcgcgtatcatgggcggcggcttcggcggctgcacgatcaatctcgtgaaagacgggctttacgacaacttcatcgctacggccaaagagaagttcaacgccaagtacggccatgaacccaaagtctatgaggtggtgatctccgacggctcgcgtcggttggagtaactccccgaaacctatcaagcaaaggccccatccgaagatggggcctttttatgtcgttacgatcgttttattcgggcagcagggactgcgtggtcagcggatgctggatataaatggggttggtcagggcgatcatgctgccgtcctcggcgcggagttcggcccggatccagagcgaacgctctggaatggagacgacgacggtgcccggcgcgatcgaagtgtcggagaaccatccctgctggtccgtaagccgcagccggccggcggtgttgctccggaactcggcctgcatcttgccgctgcggagcagggtgtcgccgatgtcggcatgctgtacgggcgtcgccgaattgcggacctgcatgccgatctcgaccgaggtgtcccgcgccatgtagctgcggcctgcggcgatcgcgtcgatgaccgcctcggcggaaagcgcttcggcgcggacgaccgtgtggggcgaggcgatgttgccgccgcgatggaagtcggtcgaagcgacggcgaatttgcggttgccgcccacgagcagggtatgccataattctacggcccgttcgttggcgggactccatgcgctgttccagacctcgatgccgtccatcggggttacgtcgtacaggaagtcgaggttgtaggggtggttggcgaccagcagccgtccggcctttcgggctttggccacggccttgcggtagcggagcgtgtcgttgtggtgaatccggaagtcgatccatgcgtgcgggtcgagaccgaagatgttccagtgtccctgaccgtaggtgacttccatgccgttgatcacgaggaattccgggtcctgaacttcgccccagtgcaggagggccgaggtggtgttgtggtcggtcgaaacgatgccgtcgagtcccgaagccttgccgagcgcgatgacttcggccggcgtcagccgtccgtccgagtggaccgtatgtacatggggtgcgatgcggtaccagccgggtttgtcgttcaattgcggagccgcgtacgacggcgcggggagtttttttgcccgcggaccttccgtaagggtgattttcagcgtccagtcggtggtgcgccctgccgtcgtgggcatctggatgacggtccaccggcccggattgatccgcccggcgagatagccgggcgtggcttccgtttcgccgatttcgaaactgcggcgtgcgccgcccgaccagccgcggaatcccggaccttcgaatcccgctccccgctcgtcgaagatgccgaggtccagattgcccggacgcgcttcgcccgaaccgagatgctgggttacgctgatctttacgatgccttcgggtacggtgaacgaggtgtagaccggaacatagtattgttcgggagtagccttgcctgagaaggtgagttcatgggttttgggtgctttgcctgcgccgaatgcggccgggtgcggcgtcagcaggcccgatattgccagcaggagcgctgaaatccggatgcgggtgtttgtcctgggtggagcgtttatggggcggattgtattgcgatcgtttatccgaggattttctgcagcagaatttcatcgccgtagccgcccggccgccatagccagtcgcgtttgacgccgacttcggcgaatcctgcgctgcggaacagtcgcaggctcgcttcgttgtcggccccgacgttgcaccacagctggtgcaggttcagcacctcgcgggcgtaacggcatgccgtctccacggcatccgacgcatagcctttgccgcgcagcgcgtcgtcgtggatcaggattccgatgcctgcccggcggttgatcgggtccagctcgaaaaagtcgagcgccccgacggggatgccgccgagggtctcgatgaagagccgctgctggcgggtctgaaagatgtcgaactgttgttcctgaatgaaccgttcgagcgtgtggcgcgaaaagggggtcagcgtgccgctgacgctccataccgccgtgtcgttctcccaagcgtacatcaggtcgatgtcgcccggttccaaggctcgcagccgcgttgtccggccttcgaggttcatcagatgccgatgatcttgttgcggataagcatcgccacgccccaagcgttggcattctcggtcatcttcgatacgcggaatttggtatccttgtagacgaggttgagcgagtatttgttggtcgccgatttgaggggcagcatgatatagtcgccggccgcggccatgttgccgccgacgatgaccgtttcgggattgaacgtgttgatgaggaaggcgacggccttgccgaccttttcgcccgcctcttcgatcagttcgatcgaaaggttgtcgtcgttcttcgccgcggcgatgatgtcatcgatatggatgctcttctgcttgtcgtacttctccttgaggatcgtgttcacgcctctttcgatcaggtggctcatcttgtcctcgatggcgatgcccgaaacctcggtttcgagacagccttttttgccgcacgagcagatgatttcgttgtcgaagaacggaatatggccgaactcgcctgcgaagccgcttttgccgtagtacagctgtccgtccacgacgatgccgatggccacgccgcggcccatgtggaggtagagcacgttgctctcgtccttcgacttgccgcaggtatactccgcgtagcagcgggcgcgggtgtcgttttcgagcaggacgcggatgcccacgcgctcttcgagcaggtcgcgcagcgactgttcgctggtggtgaagtatttgtagctgcggcccgtgtcgggattcacgcggcccgtcatgcagacgccgagtcccagaatcttgccgcggtcgatgccgcaggtggcgatgaagttttcgatgttggtgcagatgcgttcgatgcactgcggacggtcgagcagttcgaacgtgtagtcgtactcctccttgatgatgttgttctgcaggtcggtgatcaggaacgtcatgttgtcgcgtccgacgttcacgcccgcgaaatagatagccgagttggcgagaccgaagatgttgggacggcgtccgccgggggtctctaccttacccagatccgtgacgatgttctcatcgaccagctcctgcacgagtttggtgattgtcggcacgctgatatgcagctctttggtcagctccgaaagcgtgcattcgccgttcaccgccatgtgggcgatgatgttgcgcttgatgatactgttcttgtgtgaaatacccttcagggtatcgtcttcgtgtttgttgaaaaattcggtgagtgatgtcatccgtgctatcccatttttaactaaacctttgcaaatataataagtatatttaaaaaacgcaacatgtttttaataaaatttaataaattttgtttcaaaagtttttaaacgaaaaggaacgatctgattgtcagaccgttccttttaccgttgcgcctttttattttatagtgtcgatttcgattcgaccgttgcttcggggtttactttcttgataagaccctgaagtacagtgccggggccgagttcggtgaactccgtcacgccgtcggcgagcatgttcttcacgatgtaggtccagcgtaccggagccgtcagctgtgcgatcaggttcgctttgatctgggcgggatcggtatagggttttgcgtccacgttctggtatacggggcagacgggtgcttggaacggcgattcgttgatcgccttctccagctcctgcttggcgggctccatcagcggcgagtggaacgctccgcccacgggcagacgcagtgcgcggcgggcgcctgcggctttggctttctcgcaggcggcttcaacagcctctacggcgcctgagatgacgagctgtccggggcagttgtagttggcggccacgaccacgccgtcgatcgacgcgcagatatcctcgacggtcttgtcgtccagaccgaggatggcggccatcgtgccgggctgtgcctcgcaggcggcctgcatggccagagcacgtttcgatacgagtttcaggccgtcttcgaacgagagcgctccggcgacgaccagcgccgagaattcgcccagcgagtgtcctgcggccgcatcgggttttacgccgagcgccttggccatgattaccgagtggaggaatacggcaggctgcgttaccttcgtctgcttcagctcctcgtccgtacctgcgaacatgatgtccgtgatgcggaaaccgagaatctcgttggctttctcgaacagctccttcgcttcgggtacgttgtcgtaaaggtctttgcccataccgactgcttgggcaccctgacccggaaatacgtatgcgtgtttcataatctttgcttaaattttttgttagcgacggcaaagatacgaatttatttcctaactttgcaccgcaatggttcacaaagggccgggcaaggccccgtgtgattaaatgggaatgccgtgtaaatcggcagcagttcccgctgctgtaagttccgtcaattgccgcacactctttagccactggctccggccgggaaggcgtagcggcaggaacgagccagaagacctgccttgcgtctcccggtgggagaattctcgattttcggacaggctctgcggagaacggagcgcttcggacggtggcactgggtgtcggacgtttgttgtgaaggcggcatatataataggtatgcgccgggctgtgtaaaacggggattcgattccgggagttcgggaccggatttttttattttatacagataacttaaacaaacgaaagatgaaaaaacttttactgatcgcttttgcggcgcttgcgttcgcggcctgctcggacgatgacaagacgccgacccccccccatgttgaaacaataacttttagtgatgccgaacttggtgctgacggatacttgtggggtaagaagctggctactgatgaggatggctcgttggtgttcgaaggggttatttataaagaaggcaaggcttccttcctgtcttatttttcagatttcggcggcgtatgggatacttggtgcaagtttgccatatccggctgccatgataaggtgaccgaggggacagataatcaatttagtgtttatacgacagtcgatgacggtcagaataaatttgcggttgcatacgatatgaagggaatgggccccggatatacatttaatcctgcagttgagttttcgacgcctgtttctcctgtttcggttcgtgttgccaataatacgtggacctatctccaccttaagggtgattatagtgattacagcgtgtcgattattggcttcgacggtgaaacccagaccggaaaagttgatgtcccccttgctgcgaataacaaaatcgttgcagattggaataccgtgggactggataaattgggagtggtgacaaaaataattttttctgtcgagtgtagtgacaagatggctccgacgtatttctgtatcgatgatcttgtttattcggaataatttttatttatagaatcgtgatgaaaaatttagtttgaatttttatagctgcttgcatttttgccgcctgctcggacgatgacggccccaagacgccgcccgtcgagtacgatgtgatctctttcgaacccgcggaggggatgctcgacttcaaaggcaacgccgctgcgctccggaccgtgacgatcgtcggagaatgggccggcggctccttcgacgatgtgttgtgcggcagggaatacatgaacgaagaggatgccaacggtaattttttcgacggactcctcttcacgactgctgaccgaaagatcggtttcggctcctatttttgcgacatgtcgaaaaaccagttcggagcctatgacacttggggcggttttgcgctttcgaagaactattcgcagactccgacggccgacgggtcgccagattacaaagggagccatttttcggcgtggaccaagtcgggagccaacaataccgcgacattcgccctcgcttatttcaacgattacggcgcttatgattacaatacgcccaagatcgaattcagcgagaggcgggaagtcgcccatctgtatatggccaacgcgaccgtaacgggacagtcccaatcctccctgagcgattactggttcaaggtttcggtgaccggatatagcggaggtgtcaaaggaaaaacgatcgagcaggtgcttatcagcgggaaatccatcgtttccgattgggtgaaggtcgattgctcgtcgctcggtgctgtcgatgaactgcgtttcggtgtgatgtcgaacgatgtgagcggcggatttctgaattgcccctcctatttctgcatcgacgagatcgctttggtgaaacagacgaaataagttgagccgcgctgtttggagattagtacagctcaaacgaattccccgtacggactgccttgccgtacggggaattttatttgtatgggagcgtccggatgccggggcgaaatcccgccggaaatccgggcctccggaatgtgcggatacggtttcggacgggtcgtacgaccgtccgaagggccgctccggcattatcagatcaggttctctttctcgatgtccttgaaatagcggtacgtgccgactttcagttcgacggtcgcgggttcgtcgcatacgacgattccgtgcgggtgtacctgcatggccgaaatcgtgcagacatgcgagtagggaccttcgacgcactgctgcagggcgcgggctttcttgtggccgagcgcgaggatcagcacctgcttcgaatcgagcaccgtggcgacgcctaccgacatggcctgcttgggaaccttgttcacgtcgttgtcgaagaagcgcgaattcacgacgagcgtgtcgtaagtcagcgtcttgacgcgcgtacgcgagttgagcgacgagaacggctcgttgaacgccaagtgtccgtcttcgccgacaccgcccatgaagaggtcgatgccgcccgccttgcggattttctcctcgtattcgtcgcactccttctgcaggtcaggggcgttgccgttgaggatattgacgttgtccgggttgatgtccacgtggttgaagaaggtgttccacatgaacgaatggtagctttcggggtgctcttcgggaagcccgacgtactcgtccatgttgaacgtaacgacatccttgaaggagacctttccggccttgttcagcgcgattagctccttgtatgtcgtcagcggggtcgaacccgtaggaagtcccagtacgaaggtgcctccggccgcctgtttcttgttgatttgctctacgatgtagcgcgcggcccagcggcctgcgttttcctgcgtgtcttcgataatcagtcgcatagattgaatggttgaattattgggttatggattgtttttcatttgcggggtctcgtcagaacatcttcacgaatacctcgatcgcctgatactccgccatgccgagcttgtcgtaaagcttggcggtgttctgcgtgcgctcttcggcgcgctgccagaactcgcgggggtcgctgccggggaagggcatgatgtccttctgcgagaggtggcggtagatggcgtgacgcttcatgatcagctcgtcgggcgacaagggcaccgccatatcgaccatgccgaggtcccattccatccatgcgccgcggtagagccagagatggcactccttgagccattcgtcgtccttcaccacgtcgagcgcgccgagcacggcctccatggcggtgcggtgcgtgccgtgggggtcggcgaggtcgccggcggcgtaaatctggtggggcttcacctcgcggagcagtttgacgatgatttcgatgtccttctccgtgagcagtcccttcttgatgccgcccgtctcgtagaacggcaggttgaggaaatgggcgttggtgtcggggttcagcccgaacgagcgcacggcggcgcgggcctccgcacggcggatggcgcccttgaggtcgagcagcggacggggttcgggttcgcccttcttcttgccggcgatgatcttctcgacttcggcgtagtggttgccgtagcccagctcgcgggccgtgtcgatgttctggagcaccacgtcgtcgtgtacggcgacattgcccgatgtttcatacgccacgtgcacgtcgtgtccctgctgcaccagacggatgaacgtgccgcccatcgaaatcacgtcgtcgtcggggtggggcgagaaaatcacgatgcgtttgggatacggattcgacggcacggggcgcgtcgaatcgtcggcgttgggcttgccgcccggccagccggtgatggtgtgctggaggtcgttgaatacgtcgatgttgatctggtcgtaggcgcggccctgttcgagcagttcgcccagcgaattttcgatgtaatccttgtaggtgagcttcaggatcggtttctgcaccacgccgcagagccacaccacggccttgcgggtgaatttgggcgtccatttgcaggggcctaccagccacggcgtctgctcgcgggtgagcagctgggcggcgttttcgtcgattacgacttcgatgttggggtgggcctgcaggttcgatgccggcacttgggtcgtgatctcgccttcgacgaccttctggatgatctgggccttctcttcgccccaagccatcaggatgatcttgtcggcccgcatgatcgtgtcgatacccatcgtgatggccagcttcggggtgtagtccagtccgaagaatgcgcccgactggattttgcgggtgttgtgggtcagctgcaccagccgggtgcgcgacttggcgtaggaacccggctcgttgaatccgatctggccgtcttcgcccacgccgataatcatcaggtcgatcttgcgcaccgaatggtcgtacgaggcgcagtactccgaaaccttgtcctcggagatggtgccgtcgggaatgtggatgttttcgggcaggatgtcgatgtggttgaggaaatcctcgtggatgcggaagttgcggctctgctgctcggtcgagcggatggggtagaactcgtcgagactgaatacggcaacgttgcggaagctgacgagaccctctttgtggcgtttcaccagctcgcggtagagtcccagcggcgtgcggcccgtggtaaggcccagcacgaagggctgctgctcttcgtagacttcgttcgaacagtggagttcgttgtaggtgcggatcgccttgacgatggtgtcggcaacgtactgaacgcccagatattcgttttcatagaccgtcgtgtgaattttctcgtaacgatggatgatgtcgcgcggcgtcgattctgcgatcaggccgccgtctttcggaagtgaatatttgttgttcatatctctgaaaatttaatttgttcgaaaaaatcgggccggtggaagtcgggtttcggcgtctcgatcggcttccacgaaaggaaatggggctgcgaaagtttgtcgccgcatttgtagaggttcaccgatgccttcagaccgctccagtcgctcagctcgtgcatgaacagcgcctgcgggggaatggccagcacgaccgaccagcggttgtctccttcgtgttcggggaacggccgcagtccgaggctcggattccgcaggatggcggccatcaccttgggcgcggcgtgcgccgggtgctcgcgctccttgcggaagcccagcagcaggcgtccgatgcaactgcactcgaagttgtagtaatagccgctgtcgtcgggggcgatgaagaactccacgcacgaatcggtccaaacttcgccgttgtcctccgtgacgcgggccatcgtgcagcgttccgcgacgtcgaagcgcagcatcaggtagtcgcccgtgtggaacatgcggaacgaaacctccggcgcgtaaggaaattggtccggccagttgcagcaggctagggcctgcggttcgatgccggcgaaagccgcttcgacggcagccttgttcgtggggacgatgcccgtgattttgcgtatttccgtcatgccttgcggtatttgtccacggtttcccgtacgatgcggcacatttcgccgtaatgctcctccatgctttgcagcaggcggtactgggcgtgggtgcgcacaaggttgtgaccggggtatttgattttataataggtgtcgccgtcgatgtagtccatcaggaaacgcaggacctgttcgaaggtgatgtatcgggccgagaaagccagatggtcgatttcggagtcggtgagctgtttggcccgctgcgagaggtagccctcggtgtaggcccggaacatttcgagtgacagcccgacgcgcgaaaggtcgcggtcgtcctcgtcgcccgtgttggcgtaggagcggatggcgtcgccgaagtcgttgagcgacgtggaggccatcaccgtgtcgaggtcgatggcgcagagcacctcgccctgcctgtcgaagagaatattgttgatcttggtgtcgttgtgcgtcacgcgcgtcggaatcgtgccgtcctcgaccttggaccagaagccgagcatctctccgcgccgcgattcgatccagccgatctcctccgaaagctcctttttgcggcctgcggcgtcgcgcttcagcgcctcgtcccactgcacgaagcggtggcggatgttgtggaatcccttgatcgtttcggccagcggctcggtgaagtcggccagctgggcttggaatttgccgattccctcgccgcccttgcgggccagttcgggcgaatcggccttgttgtaggcgacggtgtcgtcgatgaaaaccgagacggcccaatattcgccgtcgccgtcgatgtggtacagcgcgtcctctctggtcgggaccacggtcatcacttcgcgccggggatcgccgcctgccgcgatgactccgcggcggatgtggtcggtaacccggcggatgttgtccatcatggccggaacgtcgggaaatatgtttttgttcttgcgctgaagaatgtaatcgggggcctccccttcggtgcggatgatgaacgtatcgttgataaaaccctcgcccagcgagtctatggccgcgatgcctccctccaaagcgaagtgcgatgcgatctcttgcagtttcttctccatgtcgtaagatcctctgttttttagtgtttcggttgcacctccaaaggtactaaaaagaacggagtcctgcaacggaattttgttaaaagaaaattttttcctcgatttgccgaggcgggcgattatttttacgatgcaatgagccgatgaagataaaatttattatcggggttgccgcggaaaatgaaaaaatccggcagtcggaaccgccggatttatctgtcagagtgcattccatttacttgatgcagctggtcagcattttgagcttcccttcggggacgacgcggagcgacttcacggtagccggaagcagtaccgtctcgccctgatggatcggcatttcgttgccgctgtcgtcagcgatcatgcctttgccttcgacgcagatcacaacgacgaacgagtcgagcgccgcgtaatcgagcgtcagcggagcggtcaggtcgcagagcgacgtggtgaagtagggacacgacaccagttccgtttcgcggtcctgcacctgctcgtacttggtgcggtagtcgggcagcacggtgtagtcgatggctcccttcgccagctcggtgtgcagttcgcgggtattgccgtcggcgtccttgcggttgaagtcgtagatacggtaggtgatgtccgaagtctgctgaatctcggcgatgaacgcgcccgcgccgatactgtggacgcggcctgccggcaggaagaagaggtcgcccggatgtatctcgtactcggcgaggatgtcggtgatggtgttgtcctcgacgctggcttcgtactgggcgggcgtcacctgcttggcgaatcccgaccggagccgtgcgcccttgtcggcgtccacgacataccacatttcggttttgcctttcgacttgtgacgctcccacgccagccggtcgtcggggtgtacctgaatcgagagatcctgccgcgcgtcgatgaacttgatcagcagcgggaactcctcgccgaaacgttcgaagttggctttgccgagcagtgcggcgccgtggcgggcgatcaggcccggcagggtagtgcccgcttcgggacctccggccacgaccgattcgttgcctttgacgcccgaaagctcccagctttcgccgacctgcgtctggccggatgcgatttgtttgtaagggacgattttttcgccgccccagatcgtcgatttgagaatgggttggaacttatacataatagttttattgtgctttttgcgcgtcgagctggctcagggcgaacgcgtatgcgcccaccgaaatggcgttgctcgcgccgagtttcgaaatagcgacgccgatgcgcttctgggggtcgtaagccacgtaacggtcggttccgtagaccttcagcgtgcgctgatcgcctttggcgaactccttgaactcctcttcgctgtccagatcgtaaaccttcatctgcacgcggttcagctcgtcgcccgcgatggtgtgcatcttgctgcgcagctctttgagcaggctgggcatgatccatttgcgggcgcccgtgatgccgccgccgatgacgatcagaccgtcgatcagcgtcacggccgtagccatggcgtcgccggcgatctcgcccatctcggcgaaagccttgcgggcggcttccgtgtcgccttcgcgttttccgtcggcgatatcgcagaggtccttcggttccagcccgtggttcgggttgcccgtcaactctccgtagacgcgcttcacggcgcggatcgcggcgccgtcttcgacgataatgtcgggcatcttcttgtgcttgagacaaaaggtctcgacgcacgagttgtcgccgcggttgagttcgttgttcaccacgataccgatgcccagacccgtgccgaacgtgtagcccaccagattcttgtagcgtttggggcttcccagcgcttcgagccgggcgttcacttcgggcagtgcgccgcccagcgcttcgccgtaggagaagaggtcgccgtcgttgttgatgaaaaccggaatgccgaatttgtattcgaggaacggccccagcgccacgccttcgcggaacgaggggaagttgggcagatagccgccgatgattccgttcgggtagtcggccgggccggggaacgcgaagctgatggcgacgggtttctcctccagtttgtcgatgatggcctgaaagccttcgaccatcgttgccagacatttgtccaagttgtcggcgttcgacggcaacgtgatgggatcgacgatgaatttgttggcctgcatggcgccgaacaccaagttcgtgccgcctgcgtcgagtgtgatgaccacacggttgtcgtatctgtacatggtattttggttatttgttggctttggatttgatgctgtatgcgcagaaggtcaggtatacggcgcagacggtcaggatgatgagcgagccgacctgcgatccgacggtttcggtcagcagccccatcagcggggggatgatcgcgcctccgcagacgcccgtaatcatcaggcccgaaatttcattggccttgtccgggcggcggcgcagcgccagcgagtagacgatcgagaagacgcacgagagggcgaaggcgaagacgcccacgcaaatcagtatctcgatgtagctgttggcgaaatagagcacgcccagcgccgcgagcatcacgatgaggtttacgcgcaggtagcggacgtccgagagacgcgccagcaggaatgcgccgatgaatgcgccggccgtacggcagaagaaatagacgctcgatccgagtcctgcgtcggtgatttcgagtccgcagcgttcgatcagcagtttgggcgtcagcgtgttcatgcccacgtcgagacctacggtgcagaggatgccgatgaagaagagcaggatatggctgtccttcagcagcgagaacgttgcgccgaccgaactgcccgactgtagggaaacctcctctttgggaatcgaggtcatcatcagccaaagcgacgagagaagcgtgatcgcggcgaagatcgggaagaggtactgccagttgccgaagacgttcaccgcgaagacggcgataatcggacccatgaacgacgagacggccttcacgacctgtcccgccgtgagcgagctggtaagcgattcgcccgacacgacattcgtcagcagcggattgagcgacacctgcaggatcgtgttgccgattcccagcagcgcgaaggccaccatgcaggtcgcgaaattatacgatacgaacggaatcagcatgccgacgatcgtgatgacgttgctgatctggacggtgcgtttgcgtccgacgcggttcattgccagtgctacggggaccgagagcagcaggaaccagaggaataccatcgacggaatgaatccggcgagggcttcgctgaggttgaaatcgtttttgacataggtggtcgagatgccgaccacgtcgcagaatcccatcacgaagaagctgaaaaggatgggcattactttggttacggaggttttacgggctgattccataagtttggttttttgcaccccaaagatagtaaaaatatggcgaaccccgtatcctcaagcctgaaagtgtactaatccggcagaaaaatttacttgcggaagtgcggccggaggggatttcgtgcgttttttatatctttgttcgatttctaacccgttaaacgatcctttgaaatgaagaaattgctgattctcgcgctgtttgccgccgtgaccttttgtgccgctgctcaggagctgaccgtggccacctataatatccgcaacgccaatcggggcgacgccgaacgcggcaacggctgggagcgtcgcggcccgtgggtgtgccgcctgatagaattccacggcttcgacattttcggcagtcaggaggtgctcgacggccagctgcacgacatgctggcgcagcttcccgactacgactatatcggcgtcggccgtgacgacggaaagacgcaaggcgaatatgcgcccgtattctataaaaaggagcgtttccgcctgctggacgaaggccacttctggctttcggagatcaccgaccgtccgaacaaaggctgggacgccgcgctgccgcgcatctgcacgtgggggcatttcctcgacctgcagaccaagcgccgcttctggttcttcaacctgcatatggaccatatcggggtgcaggcccgtgaggagagcgccaagcttgtggtggcgaagatccgtgaaatgtgcaaacccaaagagttcgtgatcctgaccggagacttcaacgtcgaccagaacaatcatatctatacgacctttgtctcgtcgggcattttggccgactcgtacgagaccgccggaagacgctacgccccgaacggtacgttcaacagcttcaacccttcgctgaagaccgacagccgcatcgaccatatcttcgtgacgccgtcggttcgcgtgcacgattacggggtgctgaccgatacctaccgtacggagaccgccgccagcggcgaggagatcaagtcgggcgccttccccaaggaggtttcactgcacagttacgaggcgcgcacgccgtcggaccattttccggtcgtcgtgcgtctcgaattccggaaatagcgtcatccctgcggaacccgttgccggatagaaaaccgggcaagccttagtcggacttgcccagttctttgtttgtctgtttctgtccttgtttgtcggcaaggggcggcccggtgccagtgtcccgtcctgaaaaagtttgtcccgtcctgaaaaaggtttacagaaaagagtaaatcttatgcagcaaaaaacgaattcagacttatcacgtcattatttaccgcgtcagttgcgtcatctgattttacaggagtatttgagcggagtcaagacggctcgccaactctccgaagaacatggtattcccatgtctacgattcataagatgggtcagcggtggaaagcgaaaaacagttgtagctttgtgagtacccctaatccttatccgatcatgtcccgcgttacgagtgaagaagccagtgaattattatccgagaacaaagcccttcggcggcgcttggaagaggctttattacgtctggaaggctatgagatcatgggagatatcctccaagaagaatacggtatcgacctgctaaaaaaatccgcagccggacagtccagcgtctcaaagaaagacacacagcaatgagcctgtcgtttctgtgcgggttgttcggctatacccgtcaggcctattataaacatttacggcgtaatagggaaggatccttgtccgacacccttcttttggagcgggtgggttactaccggaaactgatgcccaggctcggcggtcgcaaactgtggcatttgctgcaacaagacggatttccggtcagccgggatcggttatttacgctgctttcggaaaacaatcttctggtcaaacgtcggaagaaatacagcgttacgacctgctcgcggcactggatgcgtaaatatccgaatctgatccggggtttcgacctcgagcggccgcatcgtttatgggtcggagatattacgtacatttctttgaaagaaggatttgcatatctggctttgataacggatgcctattccaaacggatcgtaggctatgatctgaatacgacattggaacgggacggagcgctccgtgcactgaggatggccatagaccagactccgcagcaaaaacggcaagggttaatccatcattcggacagaggatgccaatattgttcaaaagaatatgtgaaattgctgaccgataatgggattcgcatcagcatgactgaaaagggcgatccgtatgagaatgccgttgccgaacgggtgaacggtattctgaagagcgaatggatcgacgaggaatgttttgaaagttttcaggcagcaaaagaacgcatcgatgagatcgttatcctttataattcattcagacctcatgccagctgcgattggcttacgcccttggaagcggaacttagaaccgggaaactcaaacatcattggggccgaaagacggttgttcggaaggcatatgtaaacttatatcaggacaatattttttgaaccaaaatgtttatctttaattatcaatcactgtaaacctttttcaggacgggacacggcatctgattttaactccttttaccggaacaaaagcacctgcataatcatcgtaaactctgatagttccctccggtctgcgttttccgcgagtttccggttcctgttcttcaagggggtatccaagacttaaaaaagcagcttcctccacatttataatacccccgcgagtgggtgagattgtttcatcttctgccggaatatagcattcttcaatcacctcataaggtatttctttgggaaatgcgaagtctggctttacggttgtatacaaccaagtaaaactaccctccggaatagtcgggtcttgataaaccgcatcttccggaagttcgatattgagcggatagtcgaacagttcgaggtcataatcgtttttcagggcaataagttgtaaactgtcctgcggtaagaatctgacgtacaaatccgtcggttcaatagttttagaaacattatacgaatcgtaaacaccctgtatgacatcaaccgtgtacggattcggtaaaagttcatattctaccatatcacttccatccgaacgggtttttgcgagtgccggcgcgttggaattatcatcggtcataatgtctgtttcgtctttggtacaagaggacagcatcacagccaataataatatcaccgaatatattttcttcataaaacagttttatgtaattccgtcaaaattcaatgatttcctatttcccggcggcttttaattgactttccaatgcagcgacgcgcgcggttaattcctgaatggcgcccgtcagaatcgggataagggcggaataattgacaagacggtcaccctcttctgtcatggcgactgctccgggaatgatagcttctaattcctgcgccaaaaaaccgtattcctccacaccgctttgcactggacgaatattgaatctttcgtattcgctttcatccctccaatgatatttcacgggattcaatttcagcaccatattcgttgacgggttagattgtgcagtcgctatgttaatggaaaaagcagaccgggaaacgggtgtcgttttcaatgagcgaatattggttttcagtttttcatccgaagtctgatacatcgtgcggcaataaaggtcgatatacaaggacctgtcgctatccaaaaacacaagtttattggttgtagtagacatacggggatcggctgcatgaatgtgcattttgataccgttttggtccgtggacccccaatagtgcgcccatcccgcccaactcgtcgtataggttttatacatacctcgtcctacggtgagtttgccgtccttataggtcatttgggccaagcagttaatcgtaactgaaagaacaaacagaatggtgaagatcgttttttttcataagacaaaattttaagggttaaaagttattttgaggtttggaaattggcgttttgaatattgtggacacgatcattttccgaacgtgcgggtatatgaaaccgacggcatgataggtattagcaccgttgccttatagctgccccggtaaggataaatgcttacggggtttttgtgccatgtggcgttgatgatcgagaactgccagttgcgcacgccgttgcgcttgcagcgctccatgttgtagctgacatcggcgcggaaatagttgtgcatccgcatcgtgggataggccgtgatgccgatgatcggattaccgtccgtatccggatagctttcgttcgtcaggcgatacggaagcccggaacgccatgcaacattgagtgaaaaggtatgttttcggcccggtcgcttcaccacgtcgtagctgacgaacgcattgaaatcgtgcggtacgtcatattcaaacggataggttacgccgtccgagcggcggcgggaatcggtataggtataggaagccgtcaggctcaggcgttcggtctggtactggagcattgcttcaatgccgaacgctcgtcccgtgccgtaaatgaagccgccgttgccgagcaggtaatcgtcgctgtcgtaaatcagcggcaggttgcgcatccgtttgtaatagccctccaccgaaagggtcaggttttcgtgcagcttcgcacggccgccgagcgacacctgccatgcgtgttgtaacctgccgtcccgaaacggggtccagaagtcgatcggcatcgagtagtaatagcggttgaattgaacaagtgcctgtgaatttatcgtccccgaaagccagaccgcattgtcgcggccaaaatcataggatagctgcgcacgcggctctacggcatattttgtctgctccgaattgtcatagaccgcgccccgcacacccacgtcggcccgccagcctccccattgaaagcggttgttcaggaacagcgcccccgaaacaagctgctcggaagaatagccgcggtccttgtgctgtccgttgatgatgctttttgtgtgcatcggttcgaaccgctggtgcgaaaacgtagccccgtattccagcgaccagacacgcgaaagccgttggtcgaacgtcatgcgtgctccgaactcgtgggttttgaaagtcgttttgccccaattactgaaaccgtcgtctttaaattctgtttcctgacggttttgcaggtaggtatagtaggccaccaccgaggagcgcagattatcattccaacgcgattccagccgcagggatgccgtagtattgccccagccgaacccgttttctgcgtgatcttccttgttcttcatgtggtcgtcgccggaatagattccgagcgaaagcgtatgatttcggtgaatgtcgtaagtcagtttccccgtcacgtcgtagaagccgtagcggacagcgttatcgacgattgcaagcaccgcttcgggaaagaagtaacgtgctgaaatgaggtaggaacccttatcgcgtttgataggcccgtcgagggtcccggccaacgacaaggttcccaccgtgagcgactggcggtgattccgtcggtcgccctcgcgtgtgcgaatctgcgtcagggccgagagccgggagccgtaggcgggcgatatgtaacctttcgacatctcggccgattgcaccgtttcgccgctgaatatcgagaggatgccgtaggcatgcgcctgattgtaaatcggcacgtcgtcgtaaagaattaatgtctggtcgttgctgccgccgcgtaccagcagacccgacataccgtcctttccggccgagacgcccggaagcagttgcaggaatttgaatatgtctttttcgcccgcgaacagcggagcgtatttaagctgctcgatgtccacggcgatattgcccgtctgcttgtagaccatcaacggcctgcgggcggtgacgactaccgaatctatcgcttcggtgcgtgaaatgctgtcggcgggagtttgcgccgtaagtaaggcgggaatgcaaagcgccagacagcctgcgagcagtttcctcataattcgggcgtcgtgtaatagttatatccggcgaagatgccgataccgttgtcaatgttcgagtagaccgtgatctgctcgataaagggattttcctgcgcactttctcccgtattcagctcatgtttatatcgggagcgcatatagcggtcgtaggtgtcggacgccgcaataatctgaaatgtgtgcctgttttcaacggctccgaaaaccgagaagcggagcgggaatgctgcgccgagattttcgcgggcgacacgcagaaaatattcgaaatctatggtgcttcctttttcgtcggattcgtaggcgtcgttcgcgccgttcacctgatcgacaaatacggaagtcgtatagaacgcatatatatctttttctccgttattgtcctgttccgtaccccggagccagatagctttggcatccacgcctgcagtaaggtccgtcatgtcgaaatgccgataccatcccttttggtgcgcgaacgatatgcgggctgcgggtgcttcgggaatcgtcgtccgggcggataactcgccgtagccggggaccgacacgacaagacggtatgagcgcccggcaacagcccggaacgttgtttgggtcgtgccctccggatcggccggacagcgcacaacctcggtattatcttcgtacaggcggatttcggcttccccaacgggagtaaacccgctttgggccgagtagctgcggctccaatgcaggcgtaccgcaaagggttcctgcggcgagatcaacgcattgacaaccacgcggggcttaaaatccttttcgccgaacgaataatcgacctcgcaggcccagcagataaaaactacaaagaataccgaaatgcagcgcagcatggtttatttaaccttaattatcaacttatctcccttacggctttccggactgcattcgtcataatagccgtaatcaagacgtagcacgatttttttaccggacgtgccgccgctgatatttactcgtaaaggaagttgcaggacatccttattcctgaaattgaaaacctgctcgctgagaatgaaatcaccgccgggttttgccgtggatagattctcctcgacaatgacctttaccgtctgtttgggatgagctttggctgcaaaagcattgcgtgtaaccaataaatccacctgcgcaccgggtccgacagttattttcgtaacaggttcaacccagccctcctgcgatggatcgttatgcaggaaataaaacatgtcctcgaagctccaaacatgtttttcatcgttgcaagaaatgaatccgatggcaaacgcaagcaagaaaagaatctttttcataataaattttagagtgtggaataatcaaggaaacagagaattatgtccctgtttccttgatatggaatagttagatacattcgggaaccggcaggtaaattccttggcagcaattaatatctgtaacaactccgcaattacccatctcacggcttcgtgccctatgtacaatgcagttgaatccgctcggcataggtacttccgtaggggtcatgttgaattgaccgtttccgaaaccgatggtcgcatacaggttctttgtggattccgttttcgaataattatttctgtatgtttcgaaagaaattcgtttcccggcgatggttaaatcccaatgcagattctcaatataaaagcggtcattgtaggtattccatcctatcagggtcttcttcttttgtcccgaaacatgcacctgaatagcaaaggaggtgttatagtatttctgtccatttacctcttgtacaacagagtgacgcaatacgttggtgcgagagaaaactttgtacttttttgtttcacgacggcgatccgtatacttctgcgaaatctctcctctggtctgggtttcatcgaatacaggcgcaacataacctatttcttcaacttcaacagcccttgtttttgcatcggtcctctcgatagttacggattccgcgttcacggtatgtttgacatcaccgacataaaaaactccattaatgtcggcaatgctggcataaccgacagaagtgataacaggcatcaggcggtcattatccattttaagatagcctgcgcaggtttcaagaaccgcttggtactcctccggagtttcacaggcgataatatcatccaacataccatccgtgaacgaacgccacgaggtgaaattatgcgctttctcgaaagcgtgcagagattcttccgaagtcagcgattccaaagtgttcaggcaaacttcacctgatgaaaaatgcagcgtgccattgatgcactgaatctcgtcattctccacaggcaccagcgtttccggggtgacggatgatgtatccacactgtcacttttcgcacaagcataagctgcaaatgcaactatagtaaaaatacaaattttggtaatcttcataatcgtatgggtttattattttaactactcgtaaagtttttcggcttcctcttttattagaaagctatttacgtccgccgccaaatacaactcctacggaaatattgaaatgccggttggccttttcttccaatttataattgaaggttacgcgaagatggtgaaacaactccacgccaatacgcggcatgaaacagaaagaccccgtcttggttcccgtcgagaatccgccccagttgggctgcgagtcatcaaaggtaatcggagccgaattatccaaagaggcataacccaaaccgatacccgcgaagaatgaaattttcttataacgccgaaaattgtaatccgtcacagccatcacgttccatgtcttgaatttcagctgtccagcattgacggactctcggtggaaaattgtccctcctacctgtacaccgacatccaacggaacgcgctgtatattatatcgcacttcagcataaaatgttgcgccgagtttgttcttgtcgaaattcagtttgtcggcaccgaaagcaaagcctccgccgatttcaccctcgatacagccaaccttacgatctgcaactgtggattggctggtttgagcattaccctgcatgaaacatagcagggcaaatgcaaagattaactttttcatacttgataaataataaacgctggaaatatacttattttgtttcaattacgcaagcgcgccactgattgtcgtatttgacggctccgtatatgcgccctcgaatgatagatacatcttttgccggtgagaaactcgaattcttataatggaatccacctccggacatattggacttgaagccaatcatgaaattaccggagaaccactgcttgtcccatcttacaacctctcgtccagtgtgataatccacctcttcgctttgtgggaatattactctgattttgcgatctccgtcacgagtagtaaacaatccgcgaggattattcaagagtcccttgttctgagaatcattgaaccaactatttatgctacttgccaatttcttcattccggcagccattgctccgttcacatcacctgttgtaacatcataatttgcaagcggaatatgaaaaaggacaattttggagtttgcaaacgggaatttctttgtcattccggtcggatatttattgtattgcggcaaaccattcggcattttaggagggtcgatgaaggtcggagacgggaatttatattcacattcgatggccgaccatccataacgaaattcttgagctttttttcgccaccagatgcctaatgtgcgtttttgcatacgaaccgtcatacctacagctcggtagataatataatcctgttcgtacatacgcaatttcatgcgatgacgcttattgtagttgttcgttatagttacattcagcccaaaccatccggagagaccttgcgccagccaacttccgttgccgccacctttcgtgtaggttgcgcggcgaatcctgtccttcggaatcttcataccgttcgtcagcgtaatacttccatcataattatacgttaccgagctattatttcctgaattaccagagccgactgacgagaagccgcctccacctgaattacccccatcaatgataacgcgatcttgaaggattagatcttctttgatataatcgactttaacaaattgcgccttaactccctttgtgtctgctatttcaacaacttgaccatgagaacattgactcgacggctaatttctgttccaccaaattagggtcgaaaagcaccttttcgttagcatcgtacatcatcataccatcctcaacgaagcgacaaatcttatcgccgacctgcacctcacgctcgccattgagaattgctgtcatgtacggatctacgatgaggctgtcttcaggttcgtattccaaagaatctgcggcgatttcagccaattctacatccgtaaactctcgaagaccttgatcgagcaagtgctggcggagcgaaacgaactctccgttcaacgcttgagctgcagcgcgggtcgctggaagatgtttgatgtcgaaagcctgtctctctttcatctgagaaatcgtggaggatagatcatcaacagagttaaaatgtaagactcctgacttaaccggtgctgtcgtttcatctgattgaggctgcatgttctcattttgtgtgagatcctgtgtacatgatgacacatacaatgccatcacaaacaataataaaattttcttcataattgatacgttaaaattggttgaaatttatttcaattaaagttacttcacggaaactatacaatgaatagagtccattgcaattggagaaacccgtactatataaataaattaatcgttacccaacgatttatctgcggcaggaagtctcactcaaattggtcggatctattctgtaaattcgatctgtcctgtgtaaatcgtaccgttttcatattcgacggtaatcaggtaaaccccgcagtcgaggtccgacacgtcgagcgtcgcagtctgatcggtgaaaatcaccatttccgtaagataggttccattgccggagatcgtaacgaatgcccggtcgcaattctccggagagtggagcgtaatggtgttgccatctgaagaaagcaccgcattaatcggcggcatgacgctgcgcggacccttaaccgtcattttcttttccagataaacggacgtggttttcggtcgtttccgatttgcatacgcttcaaagcaaattccggctccgatgcagcacagcacaagtaataaaagtaattttttcatgtgataagatatgtgggttagacaatagtaaagttaggctttcggtttcttccgatagcaaaatcagcgccgataaaatctatcacacaaagccactaaataattgatatacaaataaataaaaactgcaagaattgcataaatctcgcagtttttataatgtatgcgataattgcctgaaaaacaaaatattacatgttaatttttttggagtttttcaacggagggggggggtaatttatttgacaatcagtgtgttactacattttctgaataaaaaagtccttttcggccgaatccgacgccgcaattcgggctttcaatctcgatttgcggttgtagacattcgataccgaatcgccgattataacgctgatgatttgcgccgagaatccggcgtagatgtaacatagcaaatctatatccgcaggtttgaatttcgggaactgcttccgcagtttcacgatgatattgtcatttaccgtgtttacgatctcctccaattcttttttggtcgcgggattggatgcaaggttcgtaaagaagtttctcacttgtttgtaaatgacctcctgctgcgcttttgtattgtttcgttcatagaacgcccggccgagttggtcgaggaactcgaagcgggacaacaccaattctttaagttgcacctcctgtccctccttgacggcaagatgttcgaggatgcggttttttgatgcccggatggtgtcaacggccaacatgtagcgttcaacctgctgctgctttcgtttcatgcgttcccgatagtagtagatcaggaaaattgcgacggtgcagatcagcagtccgacaatatattcaaagtaagttcgtactttcaggcggtaactcgcaaaagcagtttgctctttataatatttcccctcggcggcggttgctgattgagataccaccatgcgggatatggaatcgctcaaccagatatattcgttgatcgaattggctgcttcctctgaatttccggatgccaattcaatttgaatagatagatatgccagttgtgcatcgtcccgaatatcctccgccaactccgaagcgatattgaaataatatcgtgcgctgtctatcttgtgttgcagataatatactttggctaatactctatattgataaattgaaagaccatctggagcggtccgttcaatttcctttacggcctgcaaggcttttggataatcgccctcatttacataaatatcccccaaattgcttaaacaagcaataaccatatcgttatcttcctgctgtgcggctgcttgcagagcttgcgaatagtatttcacggcattgtcgttatcgcccaaactggaataggcattggcgatattaagtgtcgcattattcataaacgcaggcttgcgtagtttttcccaagcgccataagcattccgataatattccagcgctccgttaaaattcatctgctcggaatagacctccccgatacgggagtataccaaacccagataataattcttatgcgccgcgaaagcgtatttttccgcagtcagataatagcgcatggcttcctgataatcgtcgccgttttgatagattcgcccatagtgatagttaatcagaaacttcaccgaatccgaacaaatccggttgtcgtaataccggtatgcaatgcgtatcagcgaatcatcatcggcatccacataatttttatcgagtgccgcggaatacaagagagcgtattttgcccgcgtgctgcgccgcagaatccggtcggggtcaatgttctcgatgatgcgcaacgagctgtccggttcgatgcgtaacaatcttgtcgcagtagacaattcttgctcgatttgcctgttgctgccacagccgcataggagcaaaaccattgaaagagataacagatatttcatacaattgccggaattgatctgaaatatagcaaaaaaacagagaacatgcaaccttattcgctatactgcggaccgggatttttattcccgttctgtttcctgcgcttcgattcgttcgatgattgcgtcgtaattctccacgtcgaaaatatcgaactcgatcaggggccgtcccgcttccctcattccgaaaatgtaattcagcagcaggatatatattcttaaatccccgcccgcgatttccatttcggcgtcgtcgaatgtcgatatatcccggttgaagcgtttttgtagaacgtggtcgaacacgaacacaggcagttgagtttgggacaacgtatcgttttggcgggcaaaactgcgtttgtattcctccgcctgcttctcgtccggcatcggcatcagccacttttgaagcaggtcgtccggcagttcggtagacagaacccggtaacgatgcttacgcagataggcgtaactcttttgaagcagtatcaggaactcccccaaagggattacgccgcccgaagaaaaggggccgaaaagtctgttcagtaattttcgcagcatgcagcgttcttgttatttcaactcctgatattggaaaatccggcgcataatctccccgtagcgcggaaagtcgaagatattgaagtccgggatttcgatgttgtgcgcccgcgtaagccggataatacgcaggatattttggaacgtatcgaagtattcgcggctctccctccaacacttttccggcagggcaagattcgttatcaccgaattcgaaagcgcatagaaaaatacccgcaggggcaacagcttcgggtcgcagactcccgtatcgcgcagcagcacgacggcggtttctttgggtgctctgaaatacttcctcaattcgtccgtgtcaggcgcaagccagtcctgcaggtagattttatcaatactattcgccatgacaaccaaatcccgttcgcgcatatagcgtaggctggcttcttttgccacgaacgcccggccgctcttgtccgacaagtcgcagacatttttccgcgggtgctgctgttccagataataggatatgaatttgtttcggaaatcgtcgcgcaactgcgtagaataatagaacagcaaatcgctcttatcgacgatatggcggtcgcggagcctttcggcttccagcggtgttttcccctcgataatttccaccttgtcggcctgttcgatgatgcggtgtgcttccgaaagccggagattgtcgcgtttataacgcagataggttttgtacttgccctgcgttatggctatgtgcagctttattttcaatccctcgccgcgcagccgcagggtcgcagccgcacagcccatttcaaaatttccctcgatgccagtcaaaaccgttctgtaacccagcggaacattgccgcggatcaactgtccgaaagcatcgtcaggcagccgacgcgcatgtttgggattattgccgacgaatccgagtatcaagccttttctcataatcgaacgtgcgggaaacagaaagcacggggaaagtgctgtttactccaaacaggtacgcccatacccaccagatatacagacctaaaccccgtgccgcagcacgaaattaaatctgcatgacaatctggtcttacaaagtgggcgttttgttggagatcagcagtttattccgttatgtagattctattatcccatgttttacagtttgttgtcgttatttcattttcatagccccagccgcggtgtttcagcttaccggcatttgggcatcttcctccccgttttgcattgcgacgatccggtccaatgcttctgtcatgtgctcactcatggcagccatcatccgctcgtcgtaataggtggacaaatccgtctccggcagcacgtccgacatggccatcgccatcagtttggaacttaataccgtcaggtagataagcgggatatacgggggcctgcttatcccgtcggtccgcaccgtgatccgctgctgcggagccgccagacgccccggtttctggccttttttctcgatgttccacagtacgttctcttcggcctgcgtgacataaaggttgaatgacagatcatcgacatactccgcccggtcaacccaaaaatcgacgccgtaatcttcggccgtggggtcggcgcagatgccgcagtcgggcatgtcgcacataatggcccgcaggatgatgtttttgtcggccagctccgcagaccgcattctgcccaatgccgcgatgcagatactaacctgcgtcgtgtaaaagtggtcgatggcccgcagggtttgttcttcttcggtgtgctgctctatcataatctgtaaaaaacggggcggaacaaattttcgacgtatcaagcctttgtattatggaaaagacagtcccgccccgtgcttattcgtttttaaaacagggtgcaggtcgctgcggggtctaaccattatgaaaaaatctaattcgacgctgcaccctgaacccggacgcgttaccccatgcgccggggcggttctttggaacggtacgtatttcgattggttggtggggcgagggaaaggtccaaaaaatggaacagccgcaattccgtgccacccgtcctacttgtcgggtttgttacggctgttccgccgccagtcggattactcccttttgcaatcttgtgcttatgatgcgctgaccgacggtttaacgtttcccggccatcggaccgggaatatagggatatagggttcttggcgaagaaaggggcggcaatgatccggccgcccgtaagtgccgcgcaaacatgcgtgccatttccatacggagcaggacagcaagaccagattttaaagggccaaccttgcaggcaggatttattagctgcgaccgaaaggcgggatttgcttttttgcacggcaagacccggcgtccggttccacgccggagccgccgtaacataccgattccgcctgctcccggttcgggggcaggtgcaatccgcaggtgcggcgatattacgcatggacggcaggacgcgacggggttccataaactcgtgggattttggaaatatgcgtcccggataggcataaaaaaagcaagggacgcagatacatttcgcgttgaaggtattaggaaacccaatcagaaaatgcaccgcgcccttgcaagtcccgtccgtaaggacggaacaaaacaagggctggcaacatttatacctctgattatgaaaagttcctaatttttcaacacggtataaagagttgctgctctttattatgtccgtcggctatgccgagctatgataattccttaaagttagcatggtaattgccttttcagtttgttctcggacaacctatgttgccccggttcaacgaaactgcctttaaggaatcgtaaggcaaatatacaaagaaaatcgaatctaacgcagtccggccgtgtgtttttggaaaaatcttgctaaatttgtgggtatgaagcaatccattgattttctgcccgaacgtaaacagcgggatttacatgaactggtcggcctgatccgcgatgaagtaaaggatgtcgtaatgattatcttgtatggcagttatgcccgcaacacctatgttgaactggatatacggcgggattacggcggcggtaaaatccaatatatgagcgactatgatattttggttgtgtcgaaaaaaaggctgggttcgcgcacggttacggtatcgagccgggttaaatccaatttcttaaaaaataaaaatgccaatactcaaacccgtccgtcgattatcaacgaaagcataaccaaattcaataatgctctttccgagggccgttatttctatgtagatattctgaccgagggaattgtgctttacaattcgggagagtgtcaattagccacgccacgcgacttgaatttttctgaaatcttacaaatggcggaagaatactataatggaaaactaaatcgggctgtaagccattatgagtattatcaattagattattcaaaagaaaggtatacttatagcacatacaatcttcatcaggtcgttgaacatcttttgaaagcaattccgttggtatttattctatacggacataaagaacatgagctggatacattgatagaaaaatgtaaggcttatacattggaattagtaaaggtgtttccattagacaccgaagaagaaaaacaccatttcgaattgctcgaacgctcctatatcgaagcacgctataacgacaaattcgttgtaccaaaggaggttgtagacgcgcttgtccccaaagtggatttattgtttaatattgtagaggatgtttgccgtaaacaattcgactactacaaacagcagagcaagaaacaactcccgaaagaaagagggtaaaaatgtaattctcttttagattcaattctatccaaatttgagcatgaagaagtggacaaaacatgaggcattaggctatttagataaacaaatagaggttatacatacgctaaaattaggtcggcgcggttcttcggaacatgtaagatggctgactaacacattagtctttttggaagaaatattcggttctgattcctattattattgtaatattaagaatcttacgtggcaatttcatgggcaacgcatatatagaggttgggatattgacggggcaatggaagcatacaatcaggaagcttatgtagagcaacttgaacaagctaatggattcttgttagccgcaaaagattaccttgatgcaaatgatattgatactgtttacagcgcatcggtcgaaaaacaagctaccggagatttaatgaaagttctttcattgtcagaacataaattaagaaaagttattcgcaccaagcctgaacgtgaaaaagaaatacaagatcaatttgaaaaccttttaatcggagcagatatagattttgagagagagggaccgcacatagattattcgtcaaaagcgtatattcctgatttcagttttaatagcatagatttagcagtagagatcaaattatgtaagacagaagaaaagacatttattcaacaaattaacgacgatattttggcctacaaaacaaagtttaacaatctgcttttcataatatatgatttaggggtcatacgtgatgttgatacatttaagcagtcgttcgaggaaacggaaaatgttattgttcatgtcataaagcattaatcggtaagttacaaacagatgacccaaaaacaagctatacaacttttcgaggaacgcaaggtgcggaccgtctgggacgacgaaaccgagaaatggtattttgcgattgtcgatgttgtcgcaattctgaccgaaagtgcagatgccgccgcctattggcgtaaactcaaacagcgacttaaagcggagggaaatgaaaccgtgacaaattgtcacggtttgaaaatgctggctgccgacggaaagatgcgtcttaccgacgtggcggacacgacacagcttttccgcctgattcagtcgatcccctcgccgaaggccgaacctttcaaacaatggatggcgcaggtcgccagcgaccgtttggaccagatgcaggaccccgaaatgtccatcgagcaggcaatggccgattacaaacggctgggatattccgagaattggataaaccaacgcctgaaaagcatggaggtccgcaaggaactcaccgacgaatggcagcgccggggcgtagagggccagcaattcgcaactctgacggacattatcacccaagcgtgggcggaccgcacgacaaaatcctacaagcagttcaaagggttgaaaaaggaaaacctgcgcgacaacatgaccaatatcgaattggcgttgaatacgctggccgaagcgtccgttacggagatttccaaacaacgccgtcccaaaggattccagcagaatgttaaagtcgcccgaagcggtggcagcgtggcaaaggccgcgcggacacagcttgaaaagcagttaggccactcggtcgtttcccccatcaacgccgcacaggtattggccgccaaaaaaaccgagcagatcgagggcgaaaaagacaaagattgaccgacgcagttgtttccaaattggaaatagctgcaataatgtcaaaccgggaccgcagggttcctgttttttgttcaaatagtttgtttcttatccaaaattcttatctttgtaaatgaataccttatatttcggacgatatgcgcaaggatgccgtgccgaaataaaaatcgggaacgctatttgatcgtcaaactgaaaaaccaaagctatgaaaaagatcgtttgtcttatcgcaatggctctgtttaccgcgacgggttgtacgtccgtggagatgaatcaaacaaagactgataccccagatgataatacacagggaaaggctactactttgtcctgcgccgattatacgctgaatcctctttggaactgggctgaaacgcccgccaatcaactgatcgtgattcgcagccaggcggaactggcggattttatatttcccaacgacaaattgcccgaagatatagacttcgaaaagaacacgctccttttggttgcaggacaggccacaaacggaatcgaaagcgtcaaaaagaactttgtaaaggcggatgctcaatatatatattccgtaacctttctgctgaacgacaccaccgaagccccgaaatggcgtgtagcgcagttggttccgtctgttccgaacgaagcgaaaatatcgctcgatctggaggttaattagccccctcctgcattgccagcagacagtagcaggtcgtcgtgaaaaaatttctcacataaggtattttcccgataacgggagatagtatgcgcggtttcaatccgaatttcacctgataattcgggtttatgaaatatagccgctgattcactatgcgtagtcccgttgccgttactaatttatggaaaccctcgatagtgatgcgcgtatcccggatttcgaaaaaacatttcaccgtgctttccttttcgccgcatgccctgaacacgaaacggaaaagaggtcggggcagcaggtggatgtaaggacagttggcgataatccggttcttcgccatttgctgatgtcccccgaacggcatttgccatgcggggaatcccagatacaaaaggccgtcagctttcagaaaggattttaaatgcaacatcaaccgctccttttcgggaatatgctccaacgcatcgtgtaggataatcaggtcgtaaggttgtgtgtcgctgtaatcgaaaatatccgaacagataaacgttcctttcaaccccctttcggcgaaaagtgtctttgcggtttcgattgacggtttgtgaatatctattcccgttaccgtggcccccattgccgcaaaaatagaaaggatgccgccaatgccgcaaccgacctccattacccggcacttacgaccgaatttcaaagacgtatgctgttcaatataaggcagataataattgcggcaggaggtggctgtttcttcaaaataggcggagcggtcttgatggcgtgtctgcatggtgaaaatcctataaaaaccaaaggcggagaatccgattctccgccttatcggtaaaaattactgtaaagaaagttctaatgacgaagtgagttcgacggtaaaaggttgagtgataataatactcttggcgttggtaaacgtcagcttggcattgttcttaacggttacgttcgtcgcagatatttcgctgcccgaaactaccgtattcgtggtaactgtcttgtcattgaaatagaccgtcgtacttgcattttgagcttccattacggcagcataggcgtcgatcaggccgtaaccaacttctgtatgccatgtgccgttcggtctgccgctaaccgtcgaatagctatatccgccgaccttgcgggctgttttctcgatgatcgtggctacctccttttgggtcaggttcggatttaccgacagtatcaaagccgctactccggcaacatgcgggcaagccgatgatgtgccgttaaaatttggcatataatcgcccgaaacatacccgacacttccggttcggtccgtagtataaataagaacgccgggagccattatatctaactgcgttccgtaatcacttccccaccagccttcgttatcaatagtcgttgaggatttacgtttacccgaaagacttaacgctccgacgacgataatatcgggcaacgatctcgcaggatagcccacggtattcgaatcataattacctgcagaaaaagttacgacacaccccagaccgttacgtccatttgtcatggccgactgtatcgcatcttctaacaactccgagaacgtcgatgatctccaagaatttgaaataacagacgcaccgtttctccaagcccaattaaatccgtcagcccttttctggggagcatccgatgttcccattaattgattgctgatcgacataacgggacagttcggggcgatgcccgcaacccccagattattgttggttttggcagatatgattccggaacatgctgtaccgtggttgccccaaatctgacttggcgacctccctgtttcggtgtcatagcttttcgacgaaacattcaaatcggggtgatccaactgtgtgccgtggtccaataccgcgacgataatatcgctgcttccctgcgttacctctctggccgggagatagttgatgtcgattcctgcagttccttgattctgccccgtattcttcaacgcccattgagcggaaaacaacgggtcattcggggctgccgtagtttcgtcctcgctgatgaaacaaggctggcaggcggcaaacgggccatcttcataaaacttattcgccatttccagcgcgtttcccagcgattcgttcgtacaggaaagcgtgtaccaaagcggcaggtattcattgtttccgagtaaagttaccttattctccgttgcaagtgttgtcaggattcttacgtcgcgtatggacttcactttgacataaaacaaatggctcaaacccaaatcagcgccgtcggaagtcttgaaataaggtgcgctgtaaaccaatgccttatcttgtgcgtttacgtccgcagttgcaacttcggcccaatacaggttatcgttggccgctgatcgtgttgcatcttgcaactggagccgggaagataaagttacttttgccgcactcaatcccgatttggagttcaggagaggtaactgcaaattcgcttcatcggaggattcaaaaagaatgtacgattttgtcgtattaattgtaatcgggattttgttccccttataccaataatagtgcgtaccggaacttaattgtgcccttgtttgcggggacatttccatttcgtcctccgtaaaattctggcatccagtgaaaactattatcgacagaaagaaaataccgattatattcagtattcttttcataataataatcgtttaattattttccagatttgagcgcttcgatttctgctttcagggtttcgatctggccgttaagctcctgaatagacttcgtaagcagcggaatcaatgcgctgtaatttacgacacggtggccctcgcaatccacggccacgatgtcgggaagtacctgctcgatctcctgggcaatgaatcccatttctttgggattggaaacgcccgtcgaacgtcggctggtcttgaaataatgcgccttatcggcccattcgaacgacacgggacgcagttgcgtgagggttgccgttgcgctgcctaacgactggatatttgttttcgacgcagcgtcggagttcgtatagacgttgcgggcgtacaggtcgatgaaaccgccgttctccgtatcgtagagtacgagtttgtcggagttgctggaaacgcgcgaatctgcggggccgaggtcgaatttaatcattcgattcccgaatttccagcaatgcgcccagccctcccagttggtcatatatccgttgtaacgctccatagcgttataaaccaaatagccgttctgatactttaattgcgcatggctattaaatgcgatgaaacacaatacgattaatgctaatacttttttcatggccttgaaatttaagttggtagtgatttttgtgtgagcaaacaaagacgttactcacagagagttttggtttagtggattagctgtcagacaaaaagttagttgctgcttctgtcatctattcgtttcccctttctttgtcctacattctatgtcattcgataaaaaaatcgcctgcgaaaacatttttgtctattgacagttcaatcgtgtaaaatcccggttccagttcggggattggaatgatactttttccattgaaaaggtcgaaacgttcacatgcaaccgtgccaaagttgccggaaattatcaactgccccgtcttgctctctgcgcccgatgcaatgacctctactatactcatagaactatcatagaatacgagcgggatattttccgataggcagacggggccgccgccgacttttacctgtttgacaataactgccgtcttgccgccgccatagaccgaataaatacctgcgaatagcataaacaaaccgacaattacagacattgcgggagagaactttttcataggcttaaatttgaaagtgagtatgagatattcgtacatttcaaaagtagagcgattgtttccgaaaaccaagaaatcagagcctctaaaatttttcaaccgcaaagtgatttcgactgaaaaacaaacagttacgcacacaaaaaagcccgaaaatttttcagttttcgggccttgctctaatatgctctaaatcagcaaattaccagcaaatctttattgtcaacaagttttgctggcaaaaatattgattatctgatatttacgaaataatattgagaatcacatctttggttgtaatatgcgaagctattattttctttttcaaatggaacttccgcatgtatattgtttttagcgtttcattggtaataacgcttatctgttgcggtgaaaatccggcatagagcaggcatagcaattccacgaaacatggcttgattttcggatattcggacttgaaattagaaatcacattatcgtattgttgatttagggtattctctaaatccgatattatcgttttatccaaaatcttttcggataaaatgcctttgactttcttggtaagagccggggaattttcaaactcgtaataggtttttgcaagttctttcaggacttgaaagcgcgtattaagcagttcactaatttttgcggcatcgggtatttgcaatttggtcttatttagttcttcaatcagcgtcagatattcctcgattctttgtttctgcatcttatttctgcggcggaagatataaataatgccgcagatcgctatgactgataccaaagcgataatataaattacattttgtcttacgctggagcggtagcgttcaaattccaaacgctcgtttttatatcgcagttcggtttctgccgcagaattattcatatagcttaaatgtatcgaatcacataaagcaagacactccttttgcatcgagtaggccgctcggtaatctgcattcatcgtataggcttcggcaaggagaattttagctgccgcatcgttttcgcgcggcccaccaatattggctgaaatcgctgcgttcaaataatattcggcgctgtccggtttattgatacgcaaataatattctcccaaaacacagtaatcattcggcgataaatcatccgacaactggagaaaacgacctacataattgtaggtttcgttggttacgcctttgttcgaaagaatcccgattaggcaacgcaggcagtacacctgaaaatcctcatacccgaattgttcggatagattcaatgcttcccgataatcccggagcgcgttatcgttatcgttctccatgtagtaaacagcggcaatggcagttttagcgctgacttggtgtttggtcttatttgcggcctgatagttttcgtaggcttcttggtaataaaacaaagccctttgataattattctgcttcaaattcagttctcctaacacgaagttacacactccgatcaggtaaggatcatctattaggtcctgatactccagcgctttaagatacgattcggttgctttctgataattatttgcgctgtattccatgcgtcccagacaataccaagaaaggaacttttgccgattcgtgcctttccgcagaaaatagtttacggcaggacgaagcatcgaatcggaatctatggtttgccctgttttatccaacgccagcgaataaagaagcccgtaatgcgcttttgtcgattttttgcaaatactgccgggagcaatagcttgcaaggagcgtaacacgctgtccggataatcgttaattatttcctccgttcgattcagttcttcggatatgtgtttgctttcggaacacgaatacaagcatagaaagacacaaacataaataaatattttcataatcagcccacaataatattacccaatatacgaaaaaatagcgattcaacctgcatttggtaaagctgacatgacataattcgttacatttgctatgaggactaattcgggaggatcatacaattcaaaagggtctgcgcattgcgcgcaggcccttttcactctctcttacacttaaaatcttcaaagaaaaaactccaaaaacaatcacctcacaaagatatgatgcctacatctttgcttttgcacttgcgttattcttctaacgaattgaacaaacctttatataacttgaatcattgcaaatatagcttttcagttctataaatcaaacaattagccataattattatttatcggaagcaacacccggatcacccatgcgaataacgtttaatttgcaccgataacgatataattcataataatttaacggtcattcttcgtattagggcaagaaaagaaaaacgcggggaacggcgaaaggaatcaggcacggcaaagagccacgaaacagacagccgaaccccgcgccgtaaaagcacgaagttcgacctgtcccgcctgtttctcaatcaaatttttgccgtttcgattccttactgaacaggccgcgagtatgtgggcgtacccttgttgcaatgacaaaggtagcaaaatatcttaaaaatgtacggggaacaatctgcggcagtcaggtcgtggaaaacccggaaacagtcagaccgaaccccgcacaaacgatgtacgaagttcagccgtcccgcctgcttcccattcaaatttccacgtttgactgccgggaacaggctatgatgaatattcaggcatgcacctttcgaatattcgcctacaaaggtatagattttttccgattccagacatatcccgtagccaattagggcgaacgagggcgaacggcagcctacaacgtcgggaattgtcgcgtccgacttacttttgccgccgaaaccaaaaactatatttatgcaacaagaagatgatttgagggcgctggcaaagattgtcgcgttcattttggccgtaggcattatctgcaatgttaccaacatttattggttctgttacgaatgactggccgacaacggctgaacattcgggattatcgaccgtattctgcatggattccagcagacgacgggattctattcctcacccctctactcaaaactgttcgcctttctgctgctcctgatcgcctgtctgggttcacggggcgttaaatcgcagaaaatcggctggccgcatatcatcacggcgggcttcgctggcttcttcctctactttttcaacgattggcttttgcatatacacgcaatgcccggcgtgcgcgtggcatggtacaccggaactctgttcgcgggttatctgctcatgcttacggccggaatatggatatggcggcttctgcggcacgacctcttggacgacgttttcaacgacgaaaacgaatcctttatgcaggaaacacgcctgctttcggacgaatattcggtgaacctgccgacgctgttccgttatcggggacaaaattttcgcggctgggtgaatatcgcggtttttcgtagctgcatggtggtcggctcaccgggcagcggaaaatcattcaccgtaatcaataattacatcaaacaactcatcgagaaaggatatagtctgtatctctatgatttcaaatatccggatttgagtatgctggcttacaaccacctgctgcgtttcacgcacaagtacgaagtaaagccgcagttctgcgtgataaacttcgacgatccccgccactcgcaccgctgcaatcccatcaatgccgattttctgaccgacattgcggatgcctatgaagctgcttacgtcataatgatcggtctgaaccgttcgtgggcacagaagcagggcgattttttcgtcgaatcacccgtcgtgctgctcacggcgattatctggtttctgcgtatctatcagaacgggaaatactgcaccttcccccacgcaatcgaactgctgaacaagaaatacgaggaggttttcaccatcctcatggcccggcccgaactggaaaactatttgagtgcgttcgtcgatgcttggcagggcggcgcacaggagcagttacagggacaaatcgcgtccgcgaagatcccgctgtcacggattatctcgcccgcgctctactgggtcatgtcgggcgacgacttttccctcgacctgaacaatccccaagccccgaaaatcctttgcgtgggcagcaaccccgaccgccagaatatctattcggcggcattgagcctttacaactcgcgcatcgtgaaaaccataaaccgcaagggaaaactcaaatgcggcgtcgtgatcgacgagctgccgaccattttcttcaaaggtctggacaacctcatagccacggcccgaagcaaccgcgtagccgtatgtctggggatgcaggacttttcccaacttacacgcgattacggcgaacacgaaagcaaagtcatacagaatatcgtaggaaacgttattgccgggcaggtcgtaggcgacacggcccgcatcctctccgaacgcttcggaaaaatcgtgcagcagcggcagtcgctcaatatcagccgtgaagataaatccacggggataaacacccagcttgacagcgtgatccccgcgtcgaaaatcagcaatctttcgcagggcgtgttcgtcggagccgtggccgacaacttcggggacaatattccgcagaaaatgtttcacgcccagattgtcgtcgatgtcgaaaaggtcaaagccgaagaaaaacagtatcgtccgattcccgtgctctccgacttcaccgacgaaaacggcaaggaccgaatggccgaggttatcgaagccaactactaccgcataaagcaggaagcggcccagatcgtagaggacgaactgcgacgcatagccgacgacccgaagctaaaacacctgtttaaaggcaacgaaaccgtagccaattagggcgaacgagggcgaacgagggcgtaaagagtatctttttgatgatggcggatatacattcgcagagcaaacagtttcacataataacttaaaattcaaattatggcagaagaacaacaacagtcgcccggtgctgcgcagcagcccaacgacaattcactcaacgagccgagtatcggcatgatgtacgacaaggagaaagaccaggcaaaggtcttttcccagaaccccgacgggagtatcggcacggtggacccgaccccggaaaatgaaagcctgttttttgtcatggacaagaacattccgctgaacttctacaagaatttgcagaagtatcacaacaaccccaccatcaacatttacgttctcccgcggcgtgcgctcggacgcatgaaagatgcgctgaaacggtattggaaaaataccacccgcgacgacgtgaaactctattacaactacaagatacacccggacggaaaattcgagtgcaagatgaaaacccgcggcatccccgttgccgaaatgccgtgggacacgctcaaccgcatggggtacagcttcggcgggctggaaaagatgaactatctccaaaagttgcagaattacgaacaaacggggatgcacaagctcaaataccatgacgatataatcaactatatcggcgagggtaaaatccggctcaaaaagagcggcaacggctacaaagtcgatgtgaaaagctatgcccggattctcgacgagggacttttcgatcagaaattcaccgaaacggatatgaagaacctcgaaatgtacggcaacctcggccgcgtgctggaaacgtccgagggtcctctgctcgtgtcgcgggacttcgatacgcggcagttggattacacgaatactgaaaatgcttttgttccccgatacatccgcggcacggaactcacacaggaggacatcaacagcttccgtcgcggtgaagtgcgcgaaatagcgattgtaaacagggacggcagcgtgaacatcgtgccctaccagtacaacgcggttttccgcaaacctatggaggtattgaccattgagcagcggaatgcgctggcaaccaaactgcgcgagcagcgcgacatggagcgtatcatttcctcgatgcccgaaaccgccgacgggcggacccaatacccgcaggcccccaagcagtcggcagaacagaccgccgagaccgccggacagggacaagcacccgcagccgtgccggagcagaaccagcaggggcaggccgccgaaacggccgggcagggacaaactcccgcacctgaccttttcggcgcaggccaaaccacgcaaggcaaaaccccggtgcagggccagacatccccgcaaggtcagaaacagccgcgagccgggcagaaatcaccgcgtccggaggtagcgacgcccacccccaaagcacaacggaaaacaggtcaacacgtttagcgctatggaaagattcgatgaatcggctattgactgggtagccgccgccaagcgcggcataagtcgccggatgctcaaagaatacggttttctggaattgctgctggagggcggcacgacacccgtaattcccttgacgctaaccctcgcggacgtgactataaaactggacggcacgcttcgactgaccgaggactgcgacaaaaacgtgcgtttcgaagtcctcggttacggctgggaagaataacctcctaaatcctaaaatatgcgaaagtgacgattttcgcccggagagcaccgagggtgcggaccgggacaggacggagcggccctgccgcagacaacaaacacaacatcaaaactttaattcacagcaaattacactcaaaacacaacgatttaacatgaaaaagattcttttcgcggcctttgccgcactttcgatgatcgcctgcaacaaagacgatgcaacgactgtcattcccgacatcgacaacaccctcaacggcgcaatcgtcgccatgaggttcaccgacgaaaccccgacccgtgcgttcttcgccgaagccgcggccgccgaagcgtgggaaaaatccctctcctcgctctccgtgtacgtgttcaacgccaaaggtgaccttatcaccctgcgcgacttcaccgcatcggaactcacggcccgcaccgcgaccttcgccctgccgcacgccacagccggaacgacctgcgacttctatgccgtagccaacatgtccctgacgggcgtcaccacgaaatccgcgctgctggcaaagctggaaacatccgccgccgactataacgggacattcgccgaggtttcgaccaaagccaagcgcagcggcggcttcgtaatgacggccggagtgagcaaggccatcgccgagggcggcacgacatccgtagccctgacactcaaacgcaccgtcgccaaagtcgccgtgcagacctccgtcgatgcgtcgttcaatagcaagtattccggaacgctgaccgtaacgggaacgaaggtggtgcgtgccgccagccagacgccgatcatcgccccggccacaccgacgcccggagccatgacctacacccatacgcaggccccggcagcggcatccggcaagtataacaaccttttctacatcttcgaaaacggagctttggcagaagcaagccgcgtcgcgctggagatcaccgcgacctatgacgccgacgggaacgcttcgacaacggccgaccgcatggaagtcgtctacaccgttcccctcacgggcaaggccgggggtgaaatcgcccgcaacggctactaccgtgtggccgccaacatcacgggtctcgtggggcaggattgccaagtcagcgtgtcggtcgccgagtgggaaacacccgtaacgcagtcggtcgatctgggcgcataaacaacctattcattaaccgccgcccgcacctttcggggcgcgggcggttatcataaatcccgatgaaacaaaccatattcattttgctcgccctcgctctttgctggggctgcattaccgaccgcgagccgaccgcacggtcgaaagtggccgtagaactgaccgtcaggtccgcccccatgacaacgacgacccgcgcgaccgacgaaacgacgatccgcgacctgaatttctaccttatggacaaagcgggccgcgtagtggtattccgctatctcaccacgacgacgctgcgcttcgaatgccctccgggcgtctacctgatgcgcattgccgtcaacgtcggccgcagtctgggtgaaagtgccgacctttcccgatacatggtaacataccagcaggattatgacacactaccgatgttttacgaacaggaaacgacgatctcatgttcgtccggcagcgtagtgcagttaccgccgataaacgttaaacgcttcgtgtcgaaaatctcctacaacctcaccgcaaaacctgccgacatggaactcaaatccgtgcaactgctcaccgttcccagcaccgcggcgctctttgcagggaacggcccggcatccggcaatcccgacgactacacccacggcccggaaatgctcctgacgggacggcaggccgcaggcagctattacatgctgcccaatcttcaaggcgtgaggacctcgatcaccgaccagaagcagaagaatgccgacaatgcgcccccttgtgcatcgtggctgcttatccgcgccacgcggggcagtaaggtgctggcctactcggtctatctgggcgaaaacaatacgtccgatttcaacgtccgggccaactgccattacaggctcaatataaccctgctgaacgacaacaccgcagacacccgaatcgcggcatatacggctgccgtgtacgacgatttcgacgacggcaatatcggcggctactgcgtgtacgacccggattacagcctgcatgtcgatatggtgaacgaaaacagctcgctcgctatcagcgggcggctggaggtgacacaaggcgacagcgactatttcgaatttgaccgtaccgactgcaataacagcttcgactttgaaatctataaccccaaaggaggtaattacttttacctcgattacggcccgtccgttttcaccaaagacaattcaacgctggcctaccgcgtaacgctgaccgacgaatacggattcgcacagtcttacgatttcaaacatacgatggcaaatatagtttacgcccatacttccgcaggcgggagcgtcacggcagacagatgcctatatacccaaactgcgaacgagggcggcggcaagcgcaccgcagcgttatgccacgaggacggatgccgactgaccgccgcagcgacggggtcctatgctttcgtgggctggtacgccgacgccgcatattcccggctcctttcatcgtcggagagctacaattatgtcccccgcgattcgcatgccgacatatatgcccgttttcgggtcatggaaacacccctcgacagtaagggaacggcgaactgctacatagccccggccctcgacacccgctattcgttcgatgcgacggtgcagggcaacggcaagaatacgacgaatatctggccgcagcagcttcacggagtttccgcccgcgtgctttgggaatcggggacattgagcgaaacggttgtcaaagatgcggcgtactcaaacggccgtatatccttttcgacgggagccgtgcggggcaacgccgtgatcgggttgttcgacgctgcgggaaactgcatctggtcgtggcatatctggtcggtcgattacgacccggcaacaatggcgcagacctattcgtccggggctgtctttatggaccgcaatatcggagcactcaccaccgactgcacgcagccctcatcgcgcgggctttactaccagtggggccgcaaagacccctttccgcatccggcgacttgtcaggatataaacaaacgcgccgacgccgtatatgccgagggattcgaatacgctgtcagctatccccgaaacgccgggactgaaagcccttatgacaatatgaccgtggagtggtcgattgctcacccgacaacctttatgagcgatgccatgtacgaagattgggaagagtggacatcagtagccgattggctttataatcatcatccgaatctttgggggaacgtcacgacaagcaacaacaatattagcaaggtaagcctcaaatcaatttatgacccgtgccccgttggttggaaagtccccagccccgaagattttgccggaatcgagcgggtaagtcagtcgtcgccctattatgtaacgattcattacaacggtaatcgcaccacgaatatcccgactggagggactttcgttgaaacacgctttatgaataacggacagctcggacggctttataccaatgcgccctacaatatgcactggggaacgtgggcttgtcgatatggcgatatttcctgcacctcgatttttttctcgacgggttccgtaccatcatttatcggcacaacagattattaccgctatgccgcaaatcctatccgctgtattcgggagtaggcttccaaagaattacaaccatgaaaaaaagacacatcatcaccttaatgctctgcctactggctttgtggggcaagccccatcgggtcgcagcgcagtttttcagcgccaaagtaaacgcgttggccgcactcaccgcaacggtgaacgtaggagtggatgccgccgtcgcggacaagtggacgttagacctttccgcctactggaatcccgtaaactccgattcgttcagttgtcggctgtatgccgcgcagatcggcacgaaacgctggctttacgaagcgttcgtgggccatttcatcggcagccagctaacctatggaaattacctgtacggcggttcccgacgctactacaaaggcggaatggccgggctgggattcagctatggttatgcttggctgctctcgaagcgttggaacgtcacggccgaaatcggcatcggggtcttttacatgaaagacacccgccgcgaccgcatcccgcccgaatacgaatccatcttcatacaccactacaagcggtgggttgtaggcccctcgcgggcagagatcagttttaactacttattctaaaagcagcatgaaaaaacttatttataccgtcgtctgcatgatgcttttttgctgcgcctgctcggatgcggacatagagcttaatccggcgacgcaggccaaacagcagcttgcaatgacattccgctgcggggccatgtccccgacacgcgccgcgacgaacgacacccgcatcgacgacatcaatctgtacttgttccccgtaaacggcggtcaggcccggcacgtctatattgctccggtgcgccccgtcgtgctggaactgcccaaaggcgactatacgctttacgccattgccaacctcggacacgacgcgggcgagcggacgcaggatttcgttcgctcgctgcgcgtcgaacgggagcctgcggccctcgcggatgctccctttcccatgtccgcgcagcaggccgtcaccgtgcgcggcgacacgcagatcgccgtatctttgcttcgcgccgtggcaaaggtcaatttcagctacaccgtggctgctgatttcgcaaagtcttttcatgtgaagtccgtgcagtttcgcagcgcaccccgttcggcggctctctttgacttcagccgcgccgagagcagcgaagccgttgccgacatgccgcccgtcgaagcgtcggcaacggcctatgccgcgacctgctatttattggagaacaggcagggagaggttgcaggcatcggctcccagcagcagaaagatcaaacccgcgccccggaacatgccacctacatagccatagcgggcgaagccgacggaacgcaggttgtgtaccgcatctatctcggagaaaacaacacgacggatttcaatgtcggccgcaaccgggtttacaacatcgacgcccgcatcctcggtctgaacaccgtggactggcgggtatcgacggcagaactcaccgtcacgccatttgccgaaaaccatgcaccgggggaacctgcgacaaccgaactgcggcttacatccacgaacaaccccgaaaatgtctattacttgtcctatcatatcgacgccgggacggggatagtcgccatcgacggcgtgaatcggaaccccggtacgccttatccgttcttttcgggcaacggaacagtaacggccggtatcagctatacgcaggcagagccgggcgacgtgcggctccgtctgacggttacggacaaatacggattcagcatggagcgtgtgctgacaacggtattcaaaaacccggaactgacgataacctatgcccagcagggaaatgaactgacggtttatgaccgggcatatatcgactataccgtgtcacaacccggttactccgggaactacaccgtaaaagtggaaggtgttccgtccgtgtactatggtcgttatggctccgacgttcccctgacgacattcacccaatacgggaacggcacaaatacattacgggtgaagccaaatatgcttgggccgaacccgctgaaaataaccgtaaccgacaccgacggccacagcgcggagatcatcacatcggtaatgggtattaagaccaccgccgacctccaaccgacattcagcacatcggggggcttgctctatgttaccgtggaatcttcgcagcccgtagtggacgacctgaccgtgaaagtgacggccaatgccgacatatattctttcggtggggccgtgacaaaaaagcagtatatcgtaacggtgaagattgaagccgaccatacgacaggaaaagggtctgtatcattgagcgggttagggagttacgccacgttcacagtaacgtcttattccgcggaatttaagcgcacatcggataacggattggtcgaatataaattgcagtagaaaatgaaaaggataatgaaaactattgccgtatgcttggccgcgttgctttgcggctgttcgataaccgggcatctggagcgtcgccaatactgcgccgacgtgttgcacgtcagccgcgaacagcgcgaacgcgagcagcagacctaccagccgcccgccttgaagatcgaatgggacagcaaccgtttctacctcgtgccgaccgaagtacaggagaacggcgaacgtataatggcaatgcagattcagcaggtaaccatacgcgccaaagcccgaacgcttcccgaacggctgggaaaggtcataatcgacttcgtgatcgacatgccccggcagttgcagggcgcatgccggagcgtcatcgtaaccccctatctgcacaagtacggcgaagcgcatgctttgcaggacatcaccattcggggcgggctgttttcacgggtgcagcagcgcgactactggcagttcggcaagtatgtccgggctttcgcacccgacagcagcgccgaagcccgcgctttcgcccgcttcgtgaaatatccctatccggagggcgtgcggctcgacagcgtggcggcccatcccggccatatctcgtactactattcgcaggaggtcccgacagacgaaacgtcgaaaacgatgcttgtaaccttacagggccgtgtcgtggccctcgacgacagcagctacacgctgcccccgtccgatacgctgacctatcacgtttcgtcgatgctctcgttcgtcgataccacgacgcgctacaaaataaaggtcataaacaagtacgccaccgtgcaggaccgcaactacattcagtttttggtgaacgacacccgtgtactcgacaccctcggcagaaacaccgcacagctcggtaagattcaggcacgcatggccggactgatcgcccagcaggaatttttcgtcgatagcgtcgtgctcacggcctcggcatccccggagggaagttttgcccgcaaccgtagtctggcgcaaggccgcgcccatgccctcaaaggctacctgcgggagcgcatcggcccccaggtcgatacgctcgttcgggtgcggtgggtggccgaggactggcccgaactggcggcccgcatccgtggtgacgaaagcctgccgcaccgcgccgaaatactggagttgatcgccgccgagaaagaccccgaccgacgggagcggctgatccgcgaacgatacccggcggattatcgctatcttaaagaaagcgtctatccgtggctgcgggccgtgacattgcgttacgacctgcgcaggcagggaatgataaaggacaccattcacacccgcgaggtcgatacggcttatatgcggggtgtggacctgctgcaaaagcgcaggtatgcgaaagccctttacatcctgcatgaataccacgaccggaacaccgttgttacgctcctttcgctcggccatgatgcacaggcgtttgaaatgctcgacgggctggaacagaccgcgaccgtcgaatacctcaaagccgtggcctgctcccgcctgggccgcaaggcagagggccgcgaacatttcctgacggcctgcggcatggacgagcggatgcagtaccgcgggaacctcgaccccgaaataaccgaacttttaaaggaataagccatgaagataggactgatagacgtagacggccaccacttcccgaaccttgccctgatgaaactttcggcatgacacaaagcgcacggcgacagcgtggagtttgccgaccccatgttcgggcaatacgaccgggtgtatatgtccaaagtatttacattcacacccgattatccgtacggattcccctgcgaggtaataaagggcggaactgggtatcgggactatgcgaccgtgctgcccccggaggtcgaacacacctgccctgattacgggctgtataactatcctgcggcaataggttttctgacccgcggatgcgtgaatcgctgcccgtggtgcgtggttccccgaaaagagggcgcattgcggggaaacgctgacatagaagaatttctggacggacgccgcaatgccgtactgctcgacaacaacgtacttgcgtccgggtggggactggagcagatcgagaagattatccggttaggggtgcgcgtagacttcaatcagggacttgatgcccggcagatcgcccggaatcccccaatcgccgaactgctctcgcgggtgaaatggatgcgttatatccgcatggcttacgacagcaccgccgtccgcgacgatgtgcgcaaggccatagaacggctgaaaaaatgcggtatgaagcccgcaaagatgtttttctatgtgctggtccgggaggtggacgacgcgctggcccgcatcgaagaactggacgcgctgggatgtcagccctttgcacagccgtaccgcgattttgagaataagatacgcccgacacccgaacagcggcgactggcccgctggtgcaaccataaaccgacgtttcacaccgtgaactacaaaaactacaaagaataacgctatgaaaaggaaatcattcgtaagcattttaatcgtgctgctggccctgttcagcctgacccgctgcaagctggcagaggtcgaaacaatcgacgaaataccgtgccccggagtggggatagacacggtgataatccccggctgggacaatcagcctgatgactaaaacaaatgtccagcctttcagggctggacatttgttatttgaacggattaagttttgcatcgtgtgcttttttttcgatcaaattctgcctttctttttcgagaattgataacacatttggcttgatgttggcattgcgttttttgcattcctcttttaagaggttaattcttgttttgacttctgaaacaagaaatttaatatcctcttttactcgttctttccattcatcgcttagtgggatgcgtgtatattctgttataatggttaaggttaatccatttgcatttgcacttccctttataggagcatagtgtgtatcggtaggagtattgaaaaagaaagtataatcaccttggattttgaatttataatcgactgcgacaaaatcataaaactcatggattgcaccaattcgtaattctggtcgtaacgcttctcgcgaaatgggcataagataactaattggctcaacatcttctgttgtaaactccgtgtcgcagataatgctatattgttgttctattctgtccgcgatcttttgcaagtcgcaatttaatagctcattatctgttattttgttaagttcggatgcgattttcttatcgctttcatcgaatcgggtttgaatgggagtattgttgaagagatacataataggaatgggttagtgtttcacaaatgtatgaataattattttttaagctaaaaagttttattgattgttgtgagagtataatttctctgcatataatccataggtatgtgattgttgtctgaatttatatacatcaaatttcttttcttttgctatattgattatagtatctatgttaccgtcaaatttgcatcctaaatacactctattaatcaagttacgcatttgtaattttaccggttcgtctaaattcagatagggattaggagtttgccgcagtatcagacgatactccttttcatgttcccaccacttcgcttttgtcgatagaaaaccgttgatttcgttctgggcttttttggatggggtgttatcaatccggggtgtctgatagtcaaatggtactatattgataagatttaaatctggaagtttatttttgtatacaacctttctgaatgagaggtaactattgattttatcgtgaaaatggttaattaaagaggtataaatgtctttcatattgacacctatacacatgcctttgtgctcgttgtaataactccacatcaaaaaggtggtagcagtttcacttaaactacaaattccgaaatatttggtgagttcatttaagtcaaaggacacactaaattccgggtattttccctgacattcgtgcgaaaggtaacaatcgtaagggtcattcagaaagcctgttcgcctgaaccataattcttctttttgcagcatggataaaccaccagtggtatcaatgtacttatatagaatagcaggatgttggtctttattggtcatagtagattcttgcgctttaaatcgttgataaagatacaaaaaaatgccatttaccattaagatattttcactaccttaatggaaaatttgaacgatatgtttgacttgaataaccttatcggtcgtctccggcgaattgaaaatgatcctgcagctcaattcgaagatattgaagatgcgtttaatgatatgatagggcagccgattgttgcgccaattataaccatgcctgccgggatattggtattacgcgctcgtcaggtaaaatcatttaatgaagttcagagtgaagaacaaatcagctatttgccgcagcaactttgtgaaaaattcggacgggcgaatatgccggataatcccttattctatggtgttcttgtaaatcgagataacgaagaagaaatcccgcgtctaacaaatagtattatactgtcgctatttgaagcctgtcccttttttcgaggaccgatgatagatgaagaatatcgtgctgttgtcggatgttgggaatcatataaaccacttgacggattgacgattataaatccagatttacgtgaaaacaggtccgggattaatcgtcaggtagcgaatggactttcgaatttcttggcagaaattgaagaattgcgtagggctggagcggatttctattctgatgacgaaataataaattttcaacgatatatgcaccataaatttacagataacgttaatgcagacagagagtactggattcccgcaaaatttacgtttgatgtgttagtgcaacccattattgacggaatattttacgagagttcacaaggacgtgtagacgatcgactgaaggattgtattagtgttgcgcttaaaccgcaatcagtagatacgaaattgcattttcttggggtctatgatgttctgataaaaaatgatggggagaaagttacgatttctgcacctatatttcggaacctttaattgtataaattacatggcctttacctgaataatgtcgtcccaactggtcgtatatcgttgggaaaggtgttcgcggttcatgcggtagggcggtgtcgcgccctgcgtggcgaggcttatcttgtttcggccgtaggtcttgttcaaggcgtccatgaccgccatgatccgcgtatgtttgtcccggtcaatcgggtcgaacatattgatttgtactccttcgttcgaccgaatatccgaaagaaccacgcccgcacgtttgtagccgtagcctttggagtacaagtcccgcagtatcttgcccgcatattttaccaattcgatggtgctgtctgtcgggttgggcagtttcagcagcgcattttcatagctttgcggcttgtcggggcggtggcggttcgtcaggatgaacacccggatttccccgcagacggattgctgcttgcgcagcttttcggcgctggtggcggtgaaaagcgcgatattacggtgcagttcgccgtaatcggaaacgtcgttgtgaaatgttcgggaggtgcgtatctgctgcttgggctgcggcatatcatcaaaccctatacaagcttcgccccgcagctctttccacatgcgcagagccgtaatgccgcccatgttcaggcgcacccactccggggataactgcgtgaagtcgtatgccgtggcgacgttcgcggccagcagcttcttttcgaagcgtctcccgatgccccatacgtcgccgatagggaaccgccgcagtactttctctatatcttccgggcggtgcatgtagcagcagcccgccagcttcggatattgcttgcacaacttactggcgatcttcgccagcgttttggtcggagcgatacccaagctgatcgggatgcccgtattctttttcactcgttgcacgatctccagcccgaagtcccgcagcgtggccgggtcgatgcccgtgaaatccatgaaactttcgtcaatggaatagacctcggtagcgggggagtacgatttaagggtattcataacccgcgtactcatatccccgtagagttccagattggaagaaaagacagcgacattattttgccggagaaatgcagcctgctgaaaataggcatcgcccatcttcaaaccgagcgcttttgcttcatcgctgcgggcaatgatgcacccgtcattattcgacaatacgacaacaggccgcccgtttagatcgggggcgaacattcgttcgcaggatgcgtagaaattattgcagtccgcaaggccgtacattattttttgactttctttattacataccggacaacgccccacacacggaagtcgcagtccgtagtgacctcgataggcttgtacttttcattggcagggacaagccaaacctgcgcccctttaaaccggatcgttttcagcgtaaattcctcgtcgataaaggacaccacgacatccccatcgagcggatcggcggacttatcgaccgccagcaaatcgccctcctcgatatgcgcgtctttcatgctgtccccgacaacacgtgcgaaaaatgtagcgttcggattcggggctaccaatttattcagatcaagcggttgttcgatgctgtcgtccgcaggggaggggaaccctgcgtgtacgccgctatccatcagaggaacctccaacggtgcagtaaggtccggtttaaaccattccaatcttatgttttcattcatagtcgaagcaaatgtatatagattttatattctaaacaagccagaatataacgaaaaaagccgccctgaaattgcaggacggctattcgtttgagtgtttgctatttcggtttgcgggtgattgtatgctttactttcagcacgacaaggttgcactcgattgtcgtttcggactgcgtggtttcaaaagcatcgtccagcaaatcgctgatgatacggctgcctttctcggcaagccgctcttgcagatgcgggtcgttaggttcttgcaacgccgacatcgtgcgagacagttctttcacctttgcaaaggtttcgataattccgattgtcgtctgtgtggcaacaggcgatttcaggattgtcgccagcatataaagtcccttttcggtaaaggctttgggggcatagcggacctttgcggattttgtggtcgaaattttcgaccgcaaatcttcccattctgacggggtaagctggagaatgtacccgtccgggaatttgtcggggttgttcttgatcgcttcgtttacgcgcttcgtttcgacgccgtaaagggctgctacgtcgctgtcgagaatcacctgacgaccctgaacaacgatgattttgtctttgattgctgtctgaactgcatccataatatagtagtttattggtaaagagtttgtaatgtttgcgttgccgtgttcaaaacgttaatgtctttgatgatcttttcgggaagaacgcgggcgtagtgctgcgtcattttcatattcgcatgtcccattgtcttggcgatggtggcaataggaacgccgaaagacatggcggtagtggcataggtatgccgggccatgtggaaagtcatattctttttgatgccgcaactacttgcaatttgcttcaagtaggcgtttacgtgctgatgcggggaacgaggtagtacgtagctgtcattctgattctcgtatttcttaattatggatttcgcaatatccataaccgggatgatcgacggaatatttgttttctgacgggtaattttaatccacatatccccgttttcagcaagcgtaatgttttcacgttttaggttcatggcatcgacaaaagctaagcccgtaaaacagctgaatacgaataggtcttttgtcgtttccaaacttcgcaatgaaaatttcttttggatgattaatttaagttcatcgaccgtcaggaaattcgggtccacagggtcaaacttaattttgtaatcgctgaacgggtcctttttcaaaagacctttcttgatgcagatttttgtaacatgtttgaatacctgcatgattttttgaacttgattgtttgaaaccttatacgtagtgaatagatagtctgaaaaatcatcgacgaaagaaccgtcgatctccgcggcgtacatatccgaacggtgatgttttaccttgatgaaatccgccacccggttatatacaagggtaatacgtttgtaggtcgaaagagaacggcatttgccgatcatatccttttgatgttgcttgtactcttggaaaacgcttaatagggtagtgctggaatcatcaatccctaaaaaagcatttttaacttgctcggcagacagcacaggaccgcgcagaaacatttcctgataggtagttctgattcttgcttcgatattgcgcagttggctatttagggaacttgctccctttccattgattttctttgttttgctgtcccattccgtagtttgcgggtcaatttccaactgcgtgaagaattgtgtcgtctgcttattgacagtaatacgccccataatgggcaataatccgctctttttctgttgcttttttacataaaaaagcacgctaaatgtgtttttcatggttactttttttggttacaaaattagtctaattgtgccttaaaactctgacaatcagcggacaactgacggacttttcaaggaattcgtaaccaaaatcggggaaaattcgtaaccaaaaatatttttgggttttggttacgaattagtaacgattttttgtcgcagtttggcattctgctgtcgtaaccgcaaaagaaaaaagccttatagtagacaactataaagcttttacgttgctttggccgttgtttggcacttatttgtgccggcttttagcattttctgtaccccctcaggggctcgaaccctggaccccaacattaagagtgtcgtgctctccaagccaccaaaacgctccgcgtttcggcgtaaccaactgagctaaagaggcatcaatcattatctgattgcgagtgcaaaggtagctataaggtaagtgttaaacaaagtgttaaacaataaatgcggataaacctgcttgcaattaatatattaagtgaattagtattattgtagtcaaaggaaaaccgcattttttcggccagcccttaaccttttaagatatatagtatatataactccattttttgtggagtaatattctttatctctaatacgtgcgtctgttccgtactaccgtacggttcctgccgctactttgcaaactgcatcagatagttttcgcagaatcccgctaacgggaatttcaccatctcgtcccgtccgtcgggcgtggtgtaatgaaatattatagcgttcgctttgacaaggcagtcgaataaatttaccgtttcgctcatgccctccatcttcatctcgttggcgattattattcctattatatcgtttatctcttcaaggtcgcttttccacccgattattcattgtttgttctttacaagtgcgatttcaacgggtttatttatgtccgctgtttcgggagagaaaacaaagtaaaacatttcgggataaatctcattttgaggttttatgacaattaagcctattccctctgtcttgctccattcgaccaacttgcaaatagcttgtttatcctctcatgctttggtcattcattccgttttcggttgtttgtatttattcatcattaacgtaatttcaattattattaagtaattgtcacgataatccttaattaccattctatgttaccgcgacattcaatttcggcctgctcctcccaatctatctcataaggattactactctttatgtattcttttgaatctctcatatcacgttcattccgttgttgccaatatttggcagacgcattatccgtgtgttttatgtttatgcgccattcattttcttcaaatatccattcccaatctactccctctttcaatcctgtttttattaatctatgtgctataatatgttcgctcaagttatgatttagcattgtatcaattatatgttttgctttttcactatggccaatcaaagagtatggtagccaaatcccaaagaaattagggttgtcgttaagaatgcgaagaagctcattttttgaaccgcgcgagtaaccttcatatcgttcaaggttttcataatatatttttcgataacgctctaataaatcagcataatctttttctgaaatatagtattgttgtttttcataatctaaagaccatcgcagtacagacatagtgtttaatttttagagtgttaatcggttgaatgttatgtaaatatagtgaatatttctcaatatagcaagtaatataaaagtgacaaactctgcaaaagggtcttatagattaaccttttcacaaagtctgtcacttcattgctttatgcggattttagtttccgcaatatttccacatttcctttaactccttttccaactcttcatcatctgttaactgaaaactggtataaatatctttgcttgccgctttcttatcatccatttcaatgtaaatcatagctcgaagataataaacgtaagcgtcttttttgaaatcattagatgatataagttgatccatatcagttaatgccgatatataattatttagtttgcaatatgtcatagctcgatgatagtaataatcgggttgagcaggatctatttcaatggctttagaaatatctgtcaatgcagattgataatctttttttgcttccgagatagcaaaacgattcaaataagaaagtacatttaaaggattttcttctatggctgtatcaaaataggacatagcatccatttgattattcgcaatatatgagataagtcctaatccgttcaagcaatcaacgtctgttggattatcattcagtatttcttggaacatttgatatgcaccacccaattcgccttctttcatttgggacattgcatataattttttgtatagattcatatctacagatagattatttcgatagtaattcaaatctatatctgtaaatctccaagagcgagaatcgtctccattgaaaatgtctattctttcgagtttattctttatagtaggaaaatagacttggaattgataagagtcacaaagagggacatccgctccattggctttattcgctcctattgatgatgaaacgatataatattttttatcgccagcttgatctttaatgcagaatccgtggtcgttttcatccttatataattcattccatattgttactgcgtctccgtacataaggttcatgttgataaatgtaaaataggccgttgtttggtttttaccaaattcgatagcatttaagataatgtcagacccattgtcacttggaagattaaggataacaaaatcgtcttttaaattgaattttctgttttctttttcaaagtcattagatgaaagttcatctacattttttgtggcaacagcaaaattcaagttctgtcctccaactcgattaaaagttgcaatgccaataactttaccgttctttgtaaggacaggacttccgctatttcctggcgaaataggtgctgaaatttggataacatctccatgagacctgtcggttcgtaatgcggatataatgcccgtcgttactgaattagttaaatcaagagggctacctatcacaataatttcatctcctttttcgtaattgccccgatgtaaggacaaattaggcaaatctacattgtcggggttgtttatcgtaaatttgacaatatctttatttttatcggacattaaaatatctttaatttcataagagtgcccgtctattgtttcgatatatgcctttaccgccccgtccaaaacatgataattagtaaaagccgtaccttcatcatcaataaaaaagcctgttcctgtaccgcttggagccccgaacttatcgtatgtatagacggtaaaaacggctttctctgcatcttgaattgtattctttatcgagcaggaagataatattaggatgcatccaattactgcaaaatattttgtaatcttcatggttttattctattttaaaacttttatctttaatgagctgtgttgattttttagcgttggtacttgtcggattttgttgtgtttttattattttctgcaacatttcttggccttcggctccgccattttgaagatatttcctatagtcagattgcccaagtatgtatttgagcccaccacaacgcatattaatttcttgaaaaactttggcatccagactatctgtaaaatttgctataattagttgataattatttactgctgacaaagcgtaaggtttccaattttcccgttgctggctgtaatcgaaatcaaaattagctttaagataaagagcgtctaatatcgcatctttataatttgctaaatattcggagataggggtgaaatattttactgctctattcgcaaatccataagcatcatccattttgctcaaatgataatatgaaaaagataaatatatgtaaacaagccctatttcatgtttttcagtccccaatgaatgtaagaaatattcaatcgcttcggaatatttttcttgtttgtagttttcaattcctttatcaaagtttggggtctttggggtcttttgttcattctcggttgaaggtgcatcatcggagaaagagaaatcacatgggagtgtgtatctaactcgtacaactttgcctttttgtgtgccaggagtccacgctggcgccaatagcaaaactcgcataacttctgccgacaatatcttatctggagattgaataatctcgatattacttagactgccatctttctcaataacaaaagatgtgactacgcgtcccgatatgccattctctaaagctaattgaggatagacaacattggcatttacccatttgcggaaagtgtctaaatctccgccttgaaaagaaggcataacatcaagggacgccttatttccatcgaatattcccaagtcatcaggaatttgagtaaacgctgcaagatgagaaaaaatgccaagccgagagcggtgtcagtagctttttcatgataagtagttttatgttagttgctattagtgcttttattttgattctaaacaagctataagaaatctatttgcatgaatgaaattatctttttgagctatccatgaaacaactgctttgttcccatgaaacaaattattacggtatcgataaataataataatgatagctaaaaccgtttcactttcattatttattttgcccaatagtacatctttaatcaaaggttcattatcattgtgtctcaatcgtaaattggcatagtaaggagttgttgcattattggctatgtagcgatttctaaaatatgtaatagtgtcagtaatcaactgtttatccaattgtagtgattggcttttgtgaatcgcttttagattggaatatgacccttgaaataataaggattcgaatagattccataagatcatgaaattacgaacttcctcgaaactcggattatcaatatccgaaattcccaaatattgatcaatccattgggtgctaacaggcgtttccattataatttcccgccgttccagcccccgtaacggcaataattaaaagagaaagcgcagggctgaaagctcatttgaggatagtaggccgtaggattgcccgaacattcaaataagcaacaaccccgcgccgtatccgtaaaggatatgacgggagataaggtctgcctattctcatgttcaatgaatttcctacgttcactatccgagaataaacttacgcttccgtaaatttcaatatgtcatccacaaaggtaaaaaacatattctgaaaacgcaatgaccttatcccgcttttcgggattgttgccgtatcaaatttctgaaaaacaaagtttctatccaatagcagggagtatggaatcgaaactttgttagttgtaagttgggttaatcgtccccgcagatttcttgtattacgccgtccatgtaaatcgcctgtccgctggattgtctgccccaccagtagcaaccgtattcctcgatgataacctcgccttgcgctttcagtcgttcggccagccatgaatcaatcagccaccattccataacatcatccgcgaacggataaagatattcttcggaaataaggtttgcccgtatcatttcctcgataactgtgctttgattcttcaaaacacaattctgtactattcgttgcgcattcatataatcggtttttgcgagttcatgcgtattagccatcggtttgcaaaatttgtgtggtctgcctgtcgttcctcggcgcaattctccattccgttttcagtcgggtacgcactatgcgattcaatgcggagagttttgttgcagtaatagtacgggataaactgctttgtacttgtgtcaaatgcaaaattcatttctgtattctgcgcaagtttacctttggattcgtagtattctaccagcgaaataaggttgtactttccattgcgcccaatcattgcggcacgtaagcgtgtgtaaactccgtttccgtggtcgattctgtaagcccgcacggctaacaaggcttgcagaatttctgtcgccctttcatttaatgttttcatggtctgtaaagtttagagttattccccattacttgtaaaaagataactccattcataaccaactaaacagggcggcatatctccatgtaagaatagctttccgattctatataattccgataattctatgctgttatatggtttcgggcataaatagggggtggtctgttttatgtggaatcctattaaatagtaagtaaaaaattcggttttccatccgaaaatggggaggggtgaaaaatagggattgtccgcgcgggatgttcgtcggcaggtggtcgggcgaagcccggccaccgcttcgcggggccgtggctcgccctctatcttctcacgaatttgtccctgataattgtcacacacgcggtcggtttaccctctattcgtgtcggcgcatcctttatctcgtatcattgcgcaaggtctgtcgctttggcttttcgttgcagacccagcgtgtcgtaaatctcctgcaagcgttctttggccttgttcttggcaatcggcgtctgtttctgaaatgcgtcgtttatcatcttcacgattttatagtcgtcgccgattgaaagcccctttaccaactcgcggcggatgttgcctacatggtatttcaacgcctgcactttggccgttcccaactcgtcgtaagcctgcttcaccagcggatgccgctgttctattacagcgcataattcggcggggctttctaccacgaaaaattgctcggtcattgttttcagtcggctgtattcatcgaacaactcctgaaaagtagtccgcgccgagggattggccgcgaggtgctccacgactttgctgtatgtctgcaccgttaccttgtagccgtttcgttgcagttcgtcggtaaggtttacataggttgcgtaaatatgtcggcttatcttaaaattcacgatgtccatgttggcgaggttcttttccacgattaggcggttatcggctatccgcacatattgttcattgatgtagggaatcttcgatagggttttaacccgtgtagcttcactcaacgagtttatctcggcggcatagctttcggcgtctgcaagcgtccgctgggtagccgcaacaaactcgtcgagcgttacggccttgctgtatttggtcgtggaatagacgtgcacgatttgcgccttgtaacgggaatctcggatgcgtccgcatatctgcgtaaagagcgttgaaatatccaacagcgtgtgcgcctttcgtccgtcgctgacgatgaatgtaacgccgtcggggtcgaagatgtcgcacccctcgaagcaggtcgaggtgtaaaagtttatcttcttcgcagggtcggagggctggccgatgggataggcattgcctaatttgcgctggttctcctgcctactctccccgctcgtagaacacaccactttgacggcttcgggagcgagtttgagcgtgtcgataacctttgcgataaattccacgctgttgacgaagatatgcaggttgtagggcaattcgtcgcgcaggactttgacgcactccgacacgatgtatttatcgggtttgttggtctgccgcgaacgcaccttaacctccgtaaggtcgggtcagtcgatttcgcaggtcggcaggtgtcgcagttcctccaacatgtattcccgctctatgggtgtcgccgtcatatatgttgccttatcgaatttagcggcttctgcaagtaaattcttaatggcattatgtcggaacgaataggagttgaacagcacgtgccactcgtccaccagcaggaacagctctttgtaagggtctatgccaatgctctgtaaagcggaaacgacgcgcggcagggaatcgtaagtcgtggctatctttaagggggaatgggtacgggcgaattgcgtgatgtcccactcggtaatgtcttcgtaaacgcccagcacctctatatcgtcggtgcggcagacggtcttgttcttcaccaatgccacgtaaggcatagcgataagggttggaatggagttgcggatagccagttcggtagccccgcaccccgtctttttcttgttaaaaaggcaattcacgggaatttcggtcataaagtcccgaagaaagtttgcacctttgggtgcgtcgatggttcaattttgcataagtaattcgtttttagtgaaataaaatctgtaattatttttaatcttgtatagtcttttaaaatgtgttattattctttctctggctcaacaattttaggcaaggatgcgttaatgaatagtttagcaacaatagccccatcgtcggtaaatgaataaaaagaaccacttttttctattaaatcgtgtaaaactgcatattcaacaatagcactatcaggtacgtattcctctgctttaattaggtggattaaccttctaaaatcattatctaaattcttctcttgaatatcctttaatatcttatgatagtgtatatttttctccttatttatagtatcattatttggaatggttatttctaggtgcggattatcaatgctttgcggattagagacagcttgctcattttgtaatttaataaacttcttttgtaattcatctatttcatcctctgcctccatgcgcttctttcgctcgtcatctgcttttgtttgcaaagcagtaattcgagatgccaatttttcatattcggctttgtctactactaatcctttatcaacttgtttcagtagccatggttttagtcgcaactcaaaccaatttgaaaggtaccctgaagcattcagtaatatataataaattataaatgggataaatgcaattaatgcacattttacaaacagccatgacaatccgccttctcggcttatataatcagcgataatgcttattctagtatctcttgtctcgtaagagctaaatgtaaatagcgtgtatataagttcccaattatctattaatagaacagcgatatatgttccaaaatatggattacttacgcgcttaacaatgctgtcttcgcatgattcaaatatcttcttaaacataaagaataatttttttcgaaattagctataaaaatatggatgccaaaaaatctgtaattatttttaatcttgtattgttattattaaagagaaagtccatttcggaatcaaaaaatattacactcggaaacaagaaaaagaggtgctgaaaaacacctcccgattatggacggactcgacattaggactgctcctttttcgtattataaagatagcaccttttttattgggaacaaaggtcggacagcaattaatccgaacatttttatctatgtcttagatggcattatttggctgtttacggggtagcggagtgtgttcgacggggaaattaatgtgcaaaaagtagtattagcgggtattttacatagctcgttgttctaaaacacctttcgtgtcatgcaattcagtactattagcggttcggtacatggtgcggctgttctgaaattcctctcgaacatgtgttttaagtgctaatagcggtttttgcatggtaaataagtgcgatgtacatgtaaaaagccgtaaatttgggtgtaaaacgctattttatgaatgaaaaggatgtcgatgccatccgtgagagtatgtatgaatccttactgatggatgaaaacgataagattgtgcattgggatttcgacccgatgcgccgtgagttgcgcgagtatgtcgatattgcctgcggatgtgatgaacagacgtatggaatccgcacaccgcaattcgaatatcgctattgtacggggaagattaagatgccctttgccaagtcggattatctcgctaacgacgatataatcgctacggttatgggattggggctggatgtcgagaaattctggtttgcgctggtctttatttacgattatgtcgaaacctcgtttaagaactgcggccttgtgaaacccgcgtctttggataaggcggtgcaaaatctgttcaaagagttgggcgaggatttcacggacgatgatattgaaataacccttaaaaagaacagaaagaaagtcgaggttctgcccgttataaagcgtgggattttggactggctgcgggaaacctatgaacgggaatgcaaaggcaggaagattcactattacgggattgacacgggtaatttcgacgaaacctatccgagtacgtcgtttcggatttatcggactgtggagatgtatcgggatatgctgaacaccttattgggggacaaccgcccgaaacaacccgataagagtgtttcattgaatcggctgttgctgatttcgcgtatctgctacctctatgaatttacctataacgacagctttttgtatagcgacgattcgttaaaaggaataattaagtcctgcaaagggcgcatgcctgcaacttattccgctgtttatctgtaatttgcaaagggagagtaaaaacgccctttatttcactccccgtgtttggggtgcgaaaagtcaaatctttgtagtgtcgaaagggataaacccgacgacctgcaaacgcttgggcaagggatgcagaataattttagcccctcccgtaagggagtacttaaaagatatggcaaatgctatcattcccgcagccgaggtcgctgcaaccaaccaagtaacggctcctgccgcaaccatcctgactgcccctgccaccgagcagaaagagccgcagacaaattcgacctcgcgccgccgccgttcgactacgcccccgatgtggcgggtaatgacgcaggcgcggcccgttttcgatgtccaactgaaaaaggataacgaaataaaattggcctgcatcgacaaattcatgaatgcggcttactcggatgcgaacaaattctgggctgatttcatggagcaggtaaatatcctgcttgacagccgcaggtattgccgtgagtgcaaaatcttgggcttgaagcctgaatatgtcgcggaacatattgtgttcctcggtagtgccacgatgaaaaaggtgctgaaagacggtgtatcccgcacattaggggctgatgtgcaactttacgggaaacgcttctcgcccgaagatgcggacagatttctgtcggaagatataaaacgtcttcccgaacaaacgacggtcgcctaatttcagcctgctgtcgttgaaaaaaaggacactccgtatattcgtcggagtgccctttttcgttcacaatagattctgcatcgccgcgtcgatttggctgttttcaaacgaatccaagtaaatctgtgtcgtggataagtcggagtgccccagcgattcggaaatgattgcaatattcactcccgaccgcttcaaaaccgttgcgaacgtgtgccgagcgacataggtagtcaatggcatttccaatcctatctgctctcccagcgtctttaattcccgattgactttccgcagaaccttgtgtgtgcggttgaaaatctgttgtgctgttttgtgttccgagcggtcgagaatagggaagatataatcttcctgtgcgtggttggccttgctgtatttctcgataatctgcaaggcgttcggtacgagttgaaaggacagcaatttctgcgttttgtggcgggaatagtaaattctgccatccacaatatcgcagtagcgcagggtagccatatccgtaaaattaatgcctgccgtgtagtaggagaacagaaagatgtctcgtgcaaactcggcatagtccgttctataattaggggctatctccaatgcaacgagtttctgtatatcttctttcgtgatggctcgctttctcgtccgtgtccataggctcccaaccttgtatttggtgaatggggtagttttaggcacgaataaaccctcggcgagtgccttgttataggcggccttaaagatagcgtatttggtggctatgctgttgtttgtgttgccctctttacgcaggaacagttcaaaatcgtgaagatatgcaaggtctatttcgtcaaatcggatattcagcgatcgaaattgcgaaaggcgggataacaaagagcggtgtttggatgccgagccgtatttgccgagtgtttccagccgttcaatggtctgtttcaaatattcgccgaccgtgcagttgattttccgtccgttggtttctaaaagattatcgagagtaacctctacctctaatgcttccaagcgtttgattttgcggcggagttcgtcgattttggtgtcgatgcggagttgtaacgcctgcaattcgggagtttggcccataacacgttgattttcaaaatcccattcattaatgttgagtgttacacccgtgctgatgtgtttaagttttcggttttgtgttaaacgcaggtgaacgggcgcggcgttttggctgttcagtctgtctttgcgaaagacggcgttaatgctgatattcatttgtttgcattgttgcgcaaacaagtttaaccaaccgatttagtgttaaacaaagtgttaaacatttccccgaaaacaccctctttcccgcccgaaaatgcctgatgatagggcagacgcacaaaaacaaaaagaccgataatcattgattatcagtcttttgctttgtaccccctcaggggctcgaaccctggaccccaacattaagagtgtcgtgctctaccaactgagctaaagaggcatcaatcgttatccgattgcgagtgcaaaattagtgataatttttattattgcaaaaaaatcctgaaaaattttcaggattttttttcgcatatccgccgacggacctgatgcagatgcgttttcgggtcgtttcggattattccagtttcaaaccgtcgctgttccactcgcctgcagcgtcgggataaatgaagggccgggtctcgctgaacttcttcatattcagataactctcatagagattgatgccgttggccgatttcgttgccagcgagaaggcgattaccgacgggtggcgcttcgaagtgtgatagctgtcttcggtccgttcgacgtaggcgttctgccaagcgggatcgttcgacgggttgcccccgatgcgacgcgattcgccgctgctgcgggtgtcgatcggagcctgcgggatcacatacatgcccatcgtgtcgcaaacagcatacagcgccggcgacacgggccccggcaggagcctgagggtgttgaatccctgctcacggagcttggctatctcctccgccgggaactggggcggaacctcgcgcgtgcggagtgcgacgggattgccgtttaccgccagctgcccgttgcgcagttcgacggtgcggaatccgagcggcagttcgatgtactccatgtagcggccttcgtgctgggtttttacgcgcagcgtgtattgcgtcggccgtccggggttccacaacatgctgtctggaatgcgggccagaaagcgcacggtgtcctcgcggcgcatgtcgagtgtgacgtccttgtatccgatggcggcattggagcctgccggagtgagcagttcatagtggatgcgtgaagtgcgcggattgagggactcggttttaacgacgagggcgatttcagccatgaccttgtcgttctcctcgctgctgcgccacgatttggtcagtacgtcgcgtacgcgcagcgtgggctggctcatgacccatgcaggacctattgccggggccggatcgcttttccagctttcgagacgcgccacctgcgacggagcgctgacgacgatttccagcgtgttgcggccctcctgcgcatggcgcgtgaggttgaattccgccggagcgctgcagtcgctgtcataggccacggctttgccgttcacgcgcacttcgtaatcggccgaagcccatcccaaatggaagaatacctgccggttggcccatgcgaacggcacggtgaactcggtcgagaaaacgttgcctttttgcgtccagtccgccagacgggtgaagtaacgggtgtcgcccgcaaaggctgcggccgcttcctgcgccgtggggtaggcgatcacttcgccgcgcggcaactcgcggccgtaggtcggaatatactcctgcgccgccagcgtgcagcacgagaagagtgctatgatcgaaagaatactcctcatatattcgcttttttaaccttcattttcgccgcccggcgaaacgagtttctctgctcggctcccgcttaacgaaaatgttcgtatatttgtgcaggtcaaagatagtaaattttccggaactaaagatgtcagaacttcccaaactcaactttcctgccatccggctgcgtgcccgccgccgcggtgagcaggttgaagtgtgggacgacctgcggggaatttacctcgtgctgacgcctgaagagtgggtgcggcgtcatctgatcgcctacctcgtgtcgcactgcggggtgctgcctaaacgcatcgtgcaggagtatgccgtgccggtcaacggacagccgcagcgcgccgacgtcgttgtggtcggcgacggcgccgaaccgctggtgctggccgaatgcaaggccccggagatacggatcgacgaacggaccctttcgcaggccgtgcgttacaattcggtgctgggggcgcagttcgtcattctgaccaacggccggagacactattgctgcgagtaccgcgacggccggtatgtccaactggcgggattcccggacttcgcggctttatagattcttgaaattggcgtcgatataacgctgaaagctctccttgtaattctccccgatgggcacgtactccgtgtcgctcaaaaacacgcggctgcggacgtagcctttgatgcagcgcagattcacgatgtaggagcggtgtacgcgcatgaacatctccgacggtagcgccgtctccatgttcttgagacggaacagggtggtgatcgtcgagccgtcggccagatgcatgcgcacgtattcgccttcgctttcgagatagacgatgtcgctgattttcaccagcgataccttgtagtccgccttcaccgagatatactccttgtctttgggcagcgcctccggaacgggttccgatgcgtcggccggtcgctggttgtggcgcagttcgtagagcgagtttgccttgcccgccgaacggctgaagtcggcgaagctgaacggcttgagcaggtaatccaccgcgtcgagcttgaacccttcgacggcgtattccgagtaggcggtggtgaagatcaccatcggcctttcgaccagcgaacggacgaactccacgccgctcaggtcgggcatgttgatatctacgaagatcaggtcggcatgctgtccggcgagaaactgctgggcttcgagtgcgttgttgcacgaagcggtaagctccagataaggaatcttccgtatgtaactttcgatctgacgcagagccagcggctcgtcgtcaatggcgatacacttaagcattgagggtcggtattacgagttttacggtgtatgtcgtagtgttttcttctatgtcgagcgtgtagttccgggggccgtagatcagttccagacgcttgcggacattgtccagtccgattccggcgctgtgtctttcgcctttctgcgtgtggcggctgttgctgatcgtgccggtgaccttgccgtcggcgtaatcgacgtgcatgtggatgaacgacgggttgttgtagctcacgccgtgcttgaatgcgttctccacgaagacgatcagcagcagcggcggaatggagacctgcgtcggcaggtcgtgcggatactccacccggatgtccacgtcgttggtgtagcggatgcgcatcagcccgatgtaattctggatgaactgaatgtccttgttgagcgagatgatttcgcgtcccgaatcgtagagcacgtagcgcatcatcttcgaaagctcgatcacggcgtttttggcatattccgtgtcgatgtcgatcagcgcatggatgttgttgagcgtgttcatgaagaagtggggattgatctggtacttcagataatccatttcggcctgcatgttctgctgtttgagctcctccatctgctgttcgtcgcgtatcgactggtacatgagcttgatgcccgtattggcccccgacatgaaaaatcccagaatcacgttccagtacatttccagatcggtgaacgacgccttgcggtgctcgatgaactggtcttcggagaggtccgagaagagcaggctgtcggtgatgtgctgttcgtagaagtccacgaaccagaacgtgccgatgatcagcgtcagattggttatcagatacttccaatacttgtgcttgagcatgaaccgcggcgcgatgacgctgttgtggacgatgaatatgatgaggtagggcgcgatcttgcgccatgcgatcaatacgttttcccagctgacgtgaagctctgacatcatcagcgagttgagcaccggcaccagaatgatggccgaccagaccatcacatagagcaggttttcgccgatcgtctgtttcttggtgattttcatgccgtaaagatagagttttgaatgataatatgaaaattcaatctaaaaagaaatatgtgggtatatttcaagaatattttttagatgaaaatattgatgaagaaattattttcatatttttgtaaaaaagtgttaagtacatgacaaaattttgaatacatcgaatttaggtgtgtatgtcggtcggaaaagcacgtttgagatttcctcaagaccatacttgaccaaagacttagcccttcgtccatgcttcagaatttttatcggtttaacgtatatatctttatgttcaccaactagatacgcccatacaaaagcaatgcagactatcgcaaacagacgcgcgatgcgccctctgtcgcgcaggtgggtgtcctcgatattgaagcccgaagatttcatggcacggaatgccgtttcaatctcccagcgttttttataggtcgcaactccatcttcaggtcggttgaaacagagcagaatctgaagttcgggtatcccgtcagagttcttgattcgacttccggcgagatagacatactgccctttgtgcaaaaagagcttgttgtagaatttctcctgtccgactttgagggaattgaagagcgaccatgctctaattctttctcctgtggaaggcttgacaacccaaacgtcctgccggatacggatatagtatcgaattctgttgtcgttaagccagcctatccactccttgccgataaactcgcggtcggccacaaggcagtcggtacagtcatgtccaaaaagtcggaagaaccgctccatgatatccttgcgttcttcccaattggaatttccgcgcttgtccaaaaggctgaacagcaatggaaaggcaatacccttgtaggtgatgccgagggtgagtatattgatgtagaactctccgaacttccagttggtgcggtccatactcagaaccaaaccgtccttaacaggaagcaacgagaagatcatccttgctaccaggtcgaggttcaaggcatagttggcaatgaatcgctgaatgcggcgcagattggaatcacgctcaaccgacgtaggcattgccgaagccagtttgtgaaggctcacagtctgcaccacacaaagtgcatggagcatgtaagccataagctttatgcaggccagattcatcgattttccaaaatactcttgcataatcgggaggatttggttaactttgaccaagtccttggaatcagtagccttcatggaaaaagcagcgaacttttctttaaaactactaattttcagggacttttgcaaatataatctattaataattagatgtttaacaatagaattttaacttttgtcatctactaaaaaaaaagtggtatatgatttatgtagtatttatcgtttttgctgtaatcgtaatttttatcattaatattaataatacgaagagtaaggaagatgcgaataagcaatattttagtgagtcgataaagtcatatgaaaattttaatccaacttatataaaatatgggttagatagtgagtatatttttgcaattgatgagcatgctaagatgttattatatcatagggtaaatacagaacctgtttttttaagatatgaagatataattgatgccgagttattagttgaagggaaggttgtatctaaattgtcgtctgttggtattgggagtgcaataggaagttttggagtggaatatggaataggtgcaatcaaagataaggcaaaaatagatgctctaggagttaatatacttgtgaataatattactatgcctcgtctattagtggtgtgttattctgggtatacaatttctagtagcggaattactgccattacatttaatcaagtacttgatgatgcaaattgcatattggaccgtttgaagattatagttgctcgacaccaaatttaccaacaaaaggagttaagtccagagttcagatcatcgactgtagatcaaatattaaaattagtgcaattgaaagaattaaaagtaataacagaagaggaattccaagtcgagaagcgaaaggtgttgaaaaatagttaacaaagatagatgtctgcaaaaaataaaaccttcgggatttaccccgaaggttttattttaaaaagcaggtaaccgaactattagtgacgcctcattgttggaattggattcagtgactatgaagaatttgggatagagaatccaaagtatgcggttacctgctgagacttgttttatttggtcaatagcgacggactgtatagataacgtttgatactgcgttttggtgttttttcgaactcggtcggataaattgccagctccgagacgcgttcgtacgccgccagcagcgtattcagctccgtgaggttgttctgcatgatctgcggcaggtcgttcttgtccacgccttccagctcggcctgctcgtaatcggggacgaccagcgccttgagctttccgttttcggtttccagtatgagcgactccagcacgagatacatgttgttgagcttgtcctcgatctcctccgggtagatgttctgtccgctgccggagaggatcatcgtcttcgaacggccccggatgtagagcgtgccgtcggggtccatcgtggccatgtcgcccgtatgcagccacccgtcgggttcgaggaccttttcggtgtccttttcgttcttgtaatatcccttcatcacatgttcgccgcggacgatgatttcgcccgcttcgtgctgcgggtcgggcgagtcgatcttcacttcgagctgttcgtgcaggtagcgcccgcacgatccggccttgaactcgttgtcgggcgtgaagctgatgagcggcgcgcactcggtcatgccgtagccgatggtgatcgggaacttgatcttcatcaggaacgcttcggtctcctgattcatcggtgcgccgccgacgatgaatatgtctacgttgttgccgaaggcctccagcagttttttgcggatcaccgagtagatggccgtgttgagcagcggaatcttcacggcgatcgacatggggcctttttcgagcatcggcatcacctgcttgcggtagaccttttcgagaatcatcggcacgcagcagatgaccgtcggtcttacgacgcccatggcttcgagcagaatcttgggcgacggaatcttgcccagcagggtgatgtgtccgcccacggccagcggcgaaaggaagtcgaacgcgcagccgtaggcgtgcgccagcggcaggaacgacagcgtgcgcccgcctttgcggaaatagaaggtgccggtctgggtgttgatcatccgctgggcgaaaatcacgttgcccgtcaggttgttcaccgtgagcatgacgcccttcgagtatcccgtggttcccgacgtgtaattgagcaggatcacctgatcgttgggaatttcggggtatttgatgtcgtttatgctgaatccgcgcggatatttcgagcggtaattcttcaggatgtcgcgctggaacttggtgagcgccttgccgtcgcgttcgtaaatggtatggaagtcggtcagcgaaaagacggcttcgatctgccggatctgctcctcttcgatattgtcccagaagttgtcgcccaagaagagcatgcggctctccgagtggttgatgatgtggatgatgtcggcgggggtgaaatcctgcaggatcgggacgatgaccgctccgtatgtgatcgtggctatgtaggtgatgcaccagcggggattgttgcggcctatgagggcgattttgtcgccctgcctgatgccggcctttttgaagaggaggtgcagcttggcgacctccttggccatctcgtaatacgaaaaagtttcgcccttgaaataatcggtcagggcgggcatttcacgattgtcgcggaaactggtttcgtatattttgatcagattctcctgtaacatggtcgcgtcctaattgctgagcaaagataggcgaaaaaaacgattttaccgccaaatcgcggtattttttatcctatattgcctatgttttgaaccgtaagccctgccgcagagctttttgagccgtttttattcctctttcttttccggcttggggggctgctgtttcacgtggcggggtttccagatgtagattttcgattccgtgccggccttgagcctttcgatatttttgcggtgcgtgtagatcagcagcacggcgatgatgaacgagaacacgacgaacggaaccagatggttcactttcggcgaaatgagcgtgaaaatggggaagctgcaccctgcgaccatcgaggccagcgatacgtagtgcgtaatcatcaacacgaggaaccagacgccgaagcagagcagcaccagcggggcgtttacgcccatgatggcgccgacgagcgtcgccacgcccttgccgccgcggaatccggcgaagatcgggaagatatgccccagaacggcggcgaatacggcgatgaagcgcaggatgtagaaccacgtttcgtttgcgccgtcggcgaaaacgctgtcgtatttcatcaggtcgatgatcgtcacggcgacgaatcccttcagcacgtccagtccgaaaacgggcagggccgcgcgcttgcccagcacgcgcagcatgttggtcgtgccggcgtttttgctgccgtgttcgcggatgtcgatgccgtaatattttttgccgatccacacggcactcggaatcgaacccagcagataggcgatgataatcagggtcgtggcggtgtaatatgtcagaatcatagtgacttttccggggtttgtataatgcaaatataataaaaaaatcgtatttgcagcttccggatgaaaaatccggcgcagggacgtcgggttttcggagaattgcgttatctttgcctaaaaatatacctttatgaatacaaaggctttgctggagccgatggggtcgtgggcgtggtggcgctcgtggttcctgatttttctcggctgttcgatcatgggcgcgggtttcgtgctgttcgtcaatccctacaatttcgtgccgggaggtgtctacggtatgggtatcgtactccacaacattttcccgtcgattcaggtcggtacgttcggctatatgttcgacgtgccgctgatgctcaccgcgatgctggttttcggcgggcagttcggtacgcgcacggtgctggctgcgctctatacgcccggtttcatgaacgtgctgacgcggctggtctatcccgacgccgcggccgtcgagagtctcgatccggcgttgttgctgggcggccggctcgacctgtcgaacgacctgctgctgacgtgtatcatcggcgccgtggtcatcggtatcgggcagggcgtcgtcgtgcgccagcaggcgactacgggcggcacggacatcgtggcgatgctgctgcagaagtttgccggcatcaagttctcgaccggcatcctgctcgccgacggtttcgtcgtgctgtcgggtctggccgttatcggtttcggactgggtacgggcgacgctgcttccaacggctggatgttgacgctctattcgctcatcacgatctacatcacctcgcgcgtgatcgcctatctgctgaacggcgcgtcgtacgacaaactgctgttcatcatcagcgaccaccacgagcagctcaagcgcttcatcatcgaagaccttgaccgcagcgccacttatatcaagtcgaaaggcatgtacaccgacgcgctgcgcgacatgatctttttggtggtcagccgcaaggaggtgcggctcgtgcagcacaagatcaaggagatcgacccttcggcgttcgtggtggtgaccgacgcctacgagactttcggcgagggcttcaagcagttccccgacaagaacgagattcatgccgaataacagaaacgaaaacgtggaattaagactcgatacgaatacattgcgccccctgtcgggcgccggacgcaaactttttgtcgaaacctacggctgccagatgaatgtcggcgacaccgagatcgtggtctccgtgatgcagcgcgaagggtacgtatataccgagcggatcgacgaggcggacgttatcctgatcaacacctgttcgatccgcgacaatgccgaacagcgcatctggggccgtctggccgagatgaaacgctaccgccgggccaaccccggactggtcgtgggtgtcatcggctgtatggccgagcgcctgaaggagaagctggtcgaaggaccgcacggcgtcgatgtcgtggccgggcctgacgcctaccgcgacctgccccggcttgtgcgcgaagccgaagcgggcggcaagggcgtcaatgtcctgctctcgaccgaggagacctatgccgagatcgctcccgtgcggctcgaccgcaacggcgtaagcgccttcgtcgccatcatgcgcggctgcaacaacttctgctcatactgcgtggtgccctatacccgcggccgcgaacgcagccgcgatcccgaaaccattctcgcggaggtccggacgctgttcgggaacggctaccgcgaggtgacgctgctggggcagaacgtcaactcctaccgcttcggcgaggtggactttcccggcctgatgcgccgcgtggcctccatttcgcccctgctgcgcgtgcgtttcgccacgtcgcaccccaaggatatcagcgaccgcctgctggaggtcatggccgaaatgcccaatatctgccgtgcgatccatctgcccgcccagtcgggtgcctcgtcgatgctcgcgcgcatgaaccgcaaatatacccgcgaatggtacctcgaccgggtcgcggccatccgccgctacctgcccgactgcgccgttacgaccgacctgatcgccggattttcgggcgagacggaggaggagcacgccgcgacgctctcgctgatgcgcgaggtcggctacgagttcgcctatatgttcaaatattcggagcgccccggcacttacgcgcacaagcacctgcccgacgacgtgcccgaagaggtgaagtcggcgcggctggccgaaatcatcgccctgcagaacgaactgagccgcgcgagcaacctgcgcgacgtggggcgcgaattcgaagtgctggtcgagggaacgtccaagcgcgacgagaaccagctttcgggccgtacctcgcagaacaaggtcgtggtcttcgaccgcggcggccacggcgtcggcgactatgtgcgggtccgcatcacgggctgcactcccgcgacgcttttcggagaagaaatttcagaaggataaaattaagatacgtaaaatgcgatttgacgaacttgagttggaggatgagatcctcgacggactctacgatatgaattttcaggagatgactccggtgcaggaacacacgatcccggtgattctcgaaggccgcgacatcatcggatgcgcgcagacgggaacgggcaagacggcggcctacacgctgccgttgctgaaccggctgctgctcgaaggcaacgaagacaatgtgataaaatcggtgatcatcgtgcccacgcgcgaactggcgcagcagatagaccagcagtttcagggcttttcctattacctgcccatctcgaccacggtcgtttacggcggcggcgacggcaagggctgggacgtgcagaagcggggtatgctgatggggtcggacgtggtcatcgccactcccggccgcatgatttcgcatatccagaacagcggcatcgacctctcgcatgtcgaatgcctgattctcgacgaagccgaccgcatgctcgacatgggtttcagcgaggacatcatgaagatcgtctcgtacatgccaaaggagcggcagacgatcatgttctcggcgacgctgcccccgaagatccgcgaactggccaagaccattctgcgcaatcccgccgaggtgaatatcgccatttcgaaacccaacgaggctatcgaccagtcggcctatgtctgctatgagaaccagaagctggacatcatccgcgagatgttcgccgagccgaccgagtcgaagacgatcatcttctcgtcgtcgaagatgaaggtcaaggagctggcccatacgctcaaacgcatgaaactcaacgtggcggccatgcactccgatctggagcaggcccagcgcgaggaggtgatgctcgacttcaagaacaacaaggtctcgatcctcgtggccaccgacatcgtggcgcgcggcattgacatcgaggacatcggactggtcatcaattacgacgtgccgcacgaccccgaagattatatccaccgcatcggccgtacggcgcgtgccgcggcgaccggcgctgccgtgaccttcgtcagcgaggaggaacaggggaaattccacgccatcgagaagtttatcgagcgggatatccgcaaagccgaactgcccgcaagcgtgggcgaaggcccgaaatacgcacccgacgaaaaccgcggacgtttcggccgcggcggcaggggcggccgtgggggatcgggacgcggaggttccggccgcggccgtggacgcggcgataaaggcgacggaggacgctcaagcaggggcgacggcgaccgtaaccgcgaccgtcgcggcgacagagagcgtgcagctgcggcgccggccgaaaacggcgccgggactccgcaggctgcgccggcggataacgaccatgcatcgggccgcggcgaaggcaaccgcggaacgcgcgaccgcaaacgccatcgcggcggccgtaaccgcaatcgcaaccgcggcggaaatccgcaggagggcggggctacgccggcggcgaattagaccggcggacacttcaagataatagagaccggactcagtcggagtccggtctttctgttttccttcccgtttgaagccgggttacttccgccgggaatggacctgcacaggtactccggagtataaaaagtccccctttgtcaaagggggacttggcgggatatcggttcctgatttcgctgtgcgaaagaggtccggtagccttgtattgcggccgtcttacttctgccggaaataaatctgcatcggcaccccggcgaaatcccagtggtcgcggatgttgttttcgaggaaccggcggtacggctccttgatgtactgcggcaggttgacgaaaaacgcgaactgcggcgtgggcgtcgggagctgggtcacgtacttgatcttgatgtatttgcccttggtcgcggggggcggatagttctcgatcagcggcagcaggaaatcgttcagttccgaggtcgagatgcggcgtttgcgcgactggtagacccggatcgcggtctggagcacgtcgaatatgcgctgtttgctgagtaccgaggtgaagatgatcggaatgtcgttgaacggcgcgagtttctttttcaggaactccgtccactccttcatcgtgttgttgtctttctctatgaggtcccacttgttgaccacgatcacgcaacccttgcggttgcggacgatcaggttgtggatgttgaggtcctgcgattcgagtccctgctgggcgtcgagcatcaggatgcagacgtcggaattctcgatggcgcggatcgagcgcatcaccgagtagaattcgaggtcctccatcgccttgcccttcttgcgcatgcctgccgtgtccacgaggtagaaatccatgccgaacttgttgtagcgggtgtggatcgagtcgcgggtggtgccggcgatcgaggtcacgatgttgcgttcctcgcccagcagcgcgttggtcatcgacgacttgccgacgttgggacggccgacgatggtgatatggggcaggtcctcgtcctcttcggggacggtctccgcgggcagcgccgcgaggatggcgtccatcaggtcgcccgtaccgctgccgctcatcgaactgatgcagaacggatcgcccaaaccgagggcgtagaactcgtgcgaggagtagatctggtcgttgttgtccactttgttgcagacgaggatcacctttttcgaggtgcggcgcaggatatcggccatcagctggtcgaggtcggtgatgccggtcgcaacctccaccagaaagaggatcacgtcggcctcgtcgatggccagcagtacctgacggcggatttcgtcttcgaaaatatcctccgaattgacggtgtagccgccggtgtcgatcaccgaaaattcctttccgttccagtccgttttgccgtagtggcggtcgcgggtggtgccggccgtcgcatcgacgatggccttccgctggcccaccagacggttgaagagggtgcttttgccgacgttaggacggcccacgattgctacaaggctcatattcttttcttttttcttagggcaaagatagtgcaagtcgggcgcaatgccaaatttatttgagcattgtccgtacgccgcctgtatgctgcacggatagtgcaggtcgggcgcaaaaccaaatgcgcgggactcttgcggaacacactctgtaaaaactgcaggacagagaatactcgtccggatacttattatatataccagctctccgtgtcgccggcctgtacggggtagaccagtacgaagctgttgtcggcgaagaattgctccatgcaggcggggaccttgctcatggcggggtggtaggagacccgctcgcggcggctcatcacgacccacaggcagtcgtcgcgtttggtctcgtaagtgagcgccgtgaggtcgtcccacgggttggagaccacgtattcggccttggccgagcgtttgccgcgggtggggcgcaggtactgcatggtgctttccggggcgtagaacacgatccgggcgcccgaattgtcggcgatgttgcgcagtttctgaatccacatctggaacccggcctccttttcggccttctccggtacgaccaccagatgccgcttgatggtcggcaggggttgcgcggggtggtagagataggtggtgacattgctctgtcccagcacgtcggcggccatgcggccgatgccagaaccgcccggcgtgcggtcgtggtgcatgcccatcacgatgtcggtgatgctgcgctccttgaccacgctgacgatggcgttggcgatgtttacgtcgtagcggagcagcgcctgcaggtagttgtccgacgcggcggcggctttggcggccgtgtcgaggattttgcggccccgcttttcgaccgtggggtcctcgatcttgttgtcgatggcgttcagggcgtagagtccgttgcgggatttggccttcttgagggtcgtgctcaggcttaccagctcgctcacggtctgctcgttggcgaccggaatgaggatgtggtcctcctgctggggctgttcgtcgtcgtcctgcgcattgcgcatggcgatgttgtgcgcgccccgctgcgtggcgaaggtcgagaccgtgcaggtggccagaatcatcaggatcgtgccgttgagcacgctttcgctcaacaggcggatcggctcgccgtcgggcgtgtgtcccagtatgacgttgtagccgaccatcaccgccgcgagcgtcgccgcgacatgggcgctgctcagtccgaagatcacggtgcgctggtccggtgagagacggaatgtcttctgcgtgagataggcggcgatgtatttggcggccgtgatcaggacgatcatgatcagcgccacttcgatgctctcccagtcgcggaagaaggcccggtagtcgatgagcatgcccacgcctatgaggaagaaggggatgaagatggcgttgcccacgaactcgatgcggttcatcagcggcgaggtgcggggtatgagccggttgagggccagaccggagaggaaggcgccgatgatcggttccagccccgcgagctgtgcgaggtaggcgccgaggaagaccatcgccagcacgaagatatactgggatacgttgtcgctgcactgtttgaagaaccagtgcgccagcagcggaaagaggaacaggatgatgccgatgcacaacagcaccgaggcgctgagcctccaccagaagctttcatccacgttgcctgtggccatgccgacgatcaccgtgagcagcagcagggccagcgtgtcggtgatgaccgtgccgccgacggcgatcgtgacggccttgtcgcgcgagatgccgagcttgctgacgatgggataggctataagggtctgggaggcgaagagtccggcaagcaggatcgaggagtagatcgggaatcccataatgtaataacctgccagaatgccgagcgcgagcggtacgcagaaggtgtagagtccgaagacgagactgcgccagccgctttttttgaagtcggacgtatccatgtccagtcccgaaagaaacatgatgtagagcaggccggcggtccccgaaaggatgatgctgctgtcgcgcagcacgaggttgagtccgtgagggccgataaccgcgccggcgattatcagccccaaaagataggggatcttcagcttgttcaggagcagcggcgccgccagaatgatgatcagaatcagcagaaacttcaggatcgggtcttcgagcggcagtgttatcggtgctatatgggcgaattgaaacatcatgcgatcatttggctttcctacaaatatataaaaatctgcggttaaaaacaagcccctgccgcattttgctgcggcggagtccgaacggccgatcctgcgggctgttttttgcgtgagtgaatggcgaggggcagagtttgcggggaaaggcgggacataaggcgtggagagtggaacggcgtttctcgcacgttttttgtcggtcgggattcggcgtcggcgccgcaaagagaaaaaattgtgaaataatcgcggtccggaaatcggtttttatggaaaaaaatgtaactttgaaaaattgtatacctgaaatttcgccgctcatgcgtgtcggtaaagtagataaacgagtgctcggccccgtgctgatgggcttcttcataatgggtttctgcgatatggtggccccgatcacgggacgtatcgcactggagtttcccgcgtcgcggcaggcggccgtgagtttcctgcccacgatggttttcctgtggtttctggtgctctccacgccgctggccgcgctgatgaaccgcataggccgcaaggcaaccgcgctgatcggctacgcctttacggtcgtcggtctgatggtcccctacgttgcgggcgaagggtgcgcgctggggtggtatttcgccggcttcggactgctgggcgtgggcaatacggcgattcaggtggcgatcaaccccctgctggccaccatcgtaccgggcgagcggatgaccagctacctcaccgtgggccagatcttccgcaacacctcgctcctgctgctggcgccgatcgtcaccgcactcgtggcgctcaccggatcgtggcgtctgctgctgccgatctatgcgggccttacggtgctgggcggcatctggctgcaggcgacttcggtagccgaaccgccgcgcagcgaccgcgccgcgggcatggccgactgcttccggctgctgggaaacccgacggtgctgctctgcacgctgggcgtggcgtgtttcatcgcgggcgacgtggggatcggattcctctcggtgcggctgatcgacaaccccgattcgatactcaccaccacgggcttctacgcctgccgcatcgtcggcacgctcgtcggggcgtgggtgctggtgcgggtgtcggacgtgaaatacctgcgctggaacatggcgggggctttggcgctctgcgccgtgctgctgctggtgcgcggcgaaacggcggtctacgccgccgtggggctgacgggattcgccatggcctgcgttttcgcgacgttctacgccgtggcgaccaaggccgtgcccgaaaaggccaacgaagtggcgggactgatgattctggccatctcggcgggagccgtttcgggacccgtctgcggggccattgtccgctggagcggcgatgcgcactggggcatgctgttcgtcgccctgtgcgtgggctacatgctctgggcgagcttcaaactgaaaataaagcaataaaaactgaaaacgatgattcgtaagatcgtagtaacctctttgctggtcgtttgcgcgctctctgccgcggcgcagcggccccgcgcccggatcgaatggggcgtattgggcggcatcaacatccccgactatacgaccaacatgtcgggcaccgacgtcaagaacaaactgggctggcaggccggtatcaccacggcggtcaatctgggggctttcgccgtcgaaccgcagatactctatgtgcgtcagggactccgcatccgccccgaagggcagaaggagatcaacctcaagtccaattcgatcgacgtgccggtgctgttgtcgttccgcctgctgcgtcccgtgcggatctatgccggtcccgtctttacggtgatgaacgactgcaagcagaagtcgggcggcgacctgctcgatttcggccgcgtgcgtcccacgatgtcctacacggtgggcgcgggagtcaagctgctgggccatctgctggtggacctgcgctacaacggccagttcaaaagcaagaaggacgtggtgcttcccgacggcggcaagctcgacaaactccgcacgtataacgtggcgcttaacttcggataccttttttagcctatgacagacgcagtcggaaaagagatactcatcgagggcgcagacccccgcgagctgtacgggccccggaatgtctacctcgatcagatgaaatcgcttcacccccagctcaggatcgtcgcgcggggctcttcgctcaaagtcctcggttccgaagccgagacgcggcgtttcgaggaacgcatggaggggctggtggcctattatctcaaatacggacacatctcgtcgcaggtcatcgaccagtgctttgcgggcggcatcgctgcgcaggaggccccggtcgacaaggacgtgatcgtctacggcaacaacggcaacatcgtccgcgcccgcacggtcaaccagctcaggctggtgaaactttatgacaggaacgacctgctcttcgccgtgggacccgccggatcgggcaagacctatacggccattgcgctggctgtgcgcgccctgaaggagaagcaggtgcggcgcatcatcctcacgcgcccggcagttgaagcgggcgagaagctgggtttcctgcccggtgacatgaaggagaagctggacccctacctgcagccgctgtacgatgcgctgaacgacatgattccgcctgccaagttggcgaagtatctggaggagggcacggtgcagatcgcgccgctggcctacatgcgcggccgcacgctcgacaacgccttcgtcattctggacgaggcgcagaacacgacgctctcgcagatcaagatgttcctgacgcgcatgggccgcaacgccaagttcatcgtcacgggcgacgtgacgcagatcgacctgccgcgcaaaagcgacagcgggctggtgcgcacgatggagattctgcgcgaggtggagggcatcggcatcgtcgaattcgacgtgcgcgacatcgtgcgccacccattggtgaagcatatcgtcgaggcgttcgacaagtgcgggacggacctgtccaaagttgaaaagtaaggacggaaccgctccgggacgggccttccggccgcatgcgggaggttcccgccggggagaggattacggcgcgtcgccgaagcggcaggctaggggagaagcagacctgtaaacgacgccaaaggcggcggcaacgacggcagggctgaacgagaatgaaagaatacgcaaaacgataacatatcattaaaacctacttttatgaacgacacacgcaatctcgcggccctgaagccggcgctggtctggaagcatttcgctcagatcgtacgcattccgcgcccctcgtcgcacgaggagaagatccgcaaatacgtcatggatttcgcacgggagaaaggactcgaatgcaaggaggacgccgcacataacgtctatgtccgcaaacccgcctcgaaaggcatggaggaccgcaagggcgtggtcctgcaggcccacctcgacatggtgccccagaagaacaacgacaagaagttcgacttcacgaaagatgcgatcgacgcctatgtcgacggcgagtgggtgacggccgacggcacgacgctcggtgcggacaacggcatcggcgcggcggccattctggccgtgctggaggacgattcgctggtacacggtccgctggaagcgctcttcacggccaccgaggagacggggatggacggcgcgttcgggctgaaaaaggggctgctgcacggtgacatcctgctgaatctcgactcggagaccgagggcgagctgtacgtgggctgcgccggagggttggacgcgaacatcgtcttcaaatatgccgccgagccgacgcccgcgcgcaactacaccgcggcccggatcacagtcaagggactcaagggcggccattcgggcattcagatcgtctgccagcgcgccaacgccaacaaggtgctgttccgtttcctgaacgccgcgtcggcgtcgcgcgatctggtgctctgttcggtggacggcggcggcctgcgcaacgccattccccgcgaagccgaggcggtcgtgatggtcaaaaccaaggagtacgaagctttcgccaaggagctgaaagcctatgaaaaggtcattaaggccgaatatgccggcattgaggacgccgtgtcgatcaaactgaaggagtgcgaagccccgaaggagcggatcgctgccgacgtggccgcccagctgaccaaagccgttgtgggatgtcccgacggcgtgcagcgcatgtcggtgtcgatgcccggactggtgcagacttcaagcaacctcgcgcgcgtggtctccgacggcaagagcgtcaaactgcagtgcctgctgcgcagctcggtgaactcggagaaggccgcgctgggcgaagcgatcgccgcggtattctctctggccggggccaaggtacagctcacgggcagctacgacggctggaatccgaacatggagtcgccgatcctcaaggccatgactgcttcctacaaggccctctacggcaaggaacccgccgtgacggcgattcacgccggactcgaatgcggcatcatcggcagcaaatatcccaagatggacatgatttcgttcggacccacgatctgctatccccactcgcccgacgagaaggtggagatcgcgtcggtgggcaagttctacgacttcatggtcgatacgctgcgcaatattcccaaaaagtagtgcgctttggaagccgacaaggtcaaatggttcgtcattgtcaatcccgtggctggaggcggccgcgggcttgaccattttccgcagatatcgaagctcctgcgcgacgctcatatcgtctgcgaaccggtcttcacggagcataagttccacgccacggaacttaccgtgtcggccgtcaaggagggttaccgcaatatcatcgtcgtgggcggcgacggcacgctacacgaggtggtgaacggacttttcatccagcaggaggtctgtcccgacgaggtgctgctggcggtgatcgccgtgggaacgggcaacgactgggtccgcacgttcggtatttcgaaccgctatcaggatgccgtgaaggccatcggcgagggctactcgttcctgcaggacgtgggcgtggtgtcgtacgaggagtcgcactaccgccagagccgctatatggccaacgtagcgggcgcgggtttcgacgcgcggatggtgcgcaagctttcgcacctcaagaaaaagggccgcaaaagccgctggcgctccacgtggtgtctggtcaagaacttcttccgctacaagtcgacgggcgtgaaggtgtgggtcgacgaccggctggtttacaacaacctgctgttcagcatcgccatcggcatctgtaagtacaacgtcggcggcatgcagcagctgcccgacgccgtggccgacgacggtatgctcgacgtgtcgctggtgcgtcccgtgcatttctggcacctgctgttccgcttccactacctgttcaacggcggcatctaccgcatccggcatatcctgcaggagagggggagctgtatccgcatcgagtcgtcgcccgaaatttcggtcgaggtggacggtgagctgctgggcgagacgccgctcgaattctcgattctccacaaggcggtccggatcgtcgtgggccgggagttctacgaccggcaggagcgcggcgagtgcccgtgcgagggcaagtagcggccgcggccggaatttgcgccggaaaacggcgtgcggcaagcggtcgtgtcgggcggcgtttccgggaagaagcggaaaataatacgttagtctctttaaaaacgatgtataacactcggaagccgcttggaaggtaaatccgaactataaatcaagcatgattatgacgcctaaagaagttttggaaaagtggatagaccgctttaatgccgccgatgcggtccgtcttacggagctgtatgccgaagatgcggtaaaccatcaggttgcgaataaaccggtggtaggaaaaacggcgatccgtgaaatgtttgcaaatgaatttgcaacggctgaaatggtttgtatcgtagagaatatttttgaagatggagaatgggcgataatggaatggaaagatcagctcggacttcgcggatgtggattttttcatgtgaaaaacgataaaatcgtctttcagagagggtattgggataaactctcgtttttgaaacagtacaatcttcctgttgaataatgctgtgaattcgtcgcggctgttttttgacgttccgttatcgggttgttcgtcgatcgggtatgtgaaccgatgagaatctgaaacaaaaaaagcaggcttttgcaaaagcctgccttttttgtgcgcggaccgtgcggctgcgcgtcgtttgccgtgcgattccggttgtcccggttatgcggtcccggttctgtcagtcggcggtctcggtcacctccacttcggtaatcacccagtcgaagaggtcgttggcgcatccggcttccatctgacgaatctgcgacatgtcggtcgtgtcggccagtatggcgttgaagaactgcgacatggtgctgtaggcagcgttcaccttgccagcgaagcagttgtagaaagccttctgctgctggtggtccagcccggcggggagcacgccctgcgccaccagatagttgtacggataaatatggcgcatgttgtgtgcgtcggcgttcagttcgtccacgatggtcgtgacgacgatcatgtcgaccgtgtcggtcacgcccggcatttcgacgaaggtcgtatagacggggtaggccccttccagatcaccggccacctcgtcggtaaagagcacgaattcatcgtccgaaaggtcgtcgagatagaccatctgacggtagctgcgcagggcttcgcgcatcgctttgcgctgttcgtgattccattgccgctgctgcgagcagccgaccagacccgctgcgaatgtcgacagcaggcagatacagaggagaatttttttcatcgtttccttgattttggttttacttgggagcaggacgcaatacgtgtgccaaaaattatatatctttgggtggcgagtaattccggccggccgtggaaatgcgccgctgcgacggaattgtgccggaccggaacgaaaaaacgatcgattatggatgtactgactttccgcgactactgtctgtcgctgccgatggccgaagagactacgcccttcgacgaaacgacccttgtctacaaggtcgggggcaagatgttcgcctgcgccgacatggccgaattcgaatgggtcgccgtgaaatgcgatccggccgaagccgtgctgctgcgtgagcagtacgacgaggtgagtgcggcgtggcacttcaacaaacgccactggaacgccgtccgcaccacgggcgacctgcccgacggctttatccgcgagcagattcgcaactcttacctgctggtgctgcggtgcagcgtgacgcccaaggcgctgcgcgaggagatcctcgcctatgtcggggagcacggcctgccggaatagggacgcggagaaggttttcggggcaggcttcgctctttgccgggcagggactccgatgcgccggagcgtcgtctttctcagcgaacaagaaccggatgcaataacgcagtaacgtgggacttaccctgcgttactgcgttattcgtaatggtcgccgagtttcggcggcccagtgccggcgccgttccgcgttgtgcggctctgctgtgtctcactcgcgttgtgttgctcagcgtcggcggcgccttgtgccgtagtgattcttcgcctgcgttactttgcggcgccggtcgtttcttgtgccgcgagcttgcgccagcgcaggtatccggccacggccagcgccgagtagagggcgtagagtcccgcggtgagggggattcccttgtagagatacagcccgatcgttatcagatcgacggccagccagacgagccactgttcgatgtatttgcgcgagagcatccacatcgccacgatgcttgccgccgtggtcatcgcgtcccagaagggcacggtactgttggtgaatcgggagagcaggaaatagattccggtgtgcgccgcggcgtagactgcggtcagtcctgctgcatagcacaggggcgtatgcccgatccggacggcggcgggttctgcgctccgggctgtttgggccgcttcgggtcctgcattgcaggccgtttggtcgctatgtcccgccgttgtgttccggtccggttggctgttgtgtccccccgcgagtgcttcgcttccggctgtttgggctggttgtcctgctgccgcgttccgggccgtcttggcttttttgtgtggggcgtttcgccacacgagccatccgtagagtcctgccagcacgtagtagacctgcatcgagcagtcggcgtacagccccgccttgtagtagagcgcgccgtggaccagcggcatgacgagtcccacgatccacagccggatgtcggcgcggtattcgagccagagatagagcagccccagcatcacgccggcgatctgcaggataagtttccaatccatcgttttatctgcgttgcgtccatccggatcgggttccgggaggacggaatttgcccgtcagaacttcaccgtgacgttggccagcacgttcaggggcgcctgcgcgaagtagtaggccatgtcgatgcgccggggcgtgggctcgctccacgtgtccatgtacgaatagccgtagccgttgctttcgtactcggcgttgaagaggttgttgatctgcaggcccagccgcacgctccgggcggcgcgggtgcggaacgtgtagcccagattgaggttggtgacgcagtagcggtcgagcgagagtgtctcgttctcgtcattggtgaagtactgtttgcctacggcctgcgtgtgcagcacggcttcgaagccccggtaatggaagtccagaaacagcgaccccatggccgacggcgagtaggagatggtccgctcgcccagattctgcccgtaggtggggctgttcgagagtgcgtccacatagttctcgatccggttctggctgaaggtggcgttggcgccggcggtgaaccatccggtcacgcgccacgaagccgtcagctcgatgccgcggcggtagctgtcgggcacgttgacgttcagtgcgtcggagctgtcgttgaccatgcccgtatgcaccagctggtccttgtacttcatgtagtataggttcacgcccgcgctgaaacggggcgacgagtagtcatagcccagttcgtagtcgtagagtttctcggacgaggggtacgagtcgtcgccggagaacatgtagcggtccgtgaagtcgctgcgcgtcggctccttctgcgccacggcgaacgagaagtagaagttgtgacgcttggcgagcgtgtagctgacgccggcgcgggggttgaagaagtgggatgtctcgtccacgtcgatgggctgcatgcccccgctcgcttcgtcgtagttgtcgttcacgccccatgccttgtagtgaacgtagcggtactgcatgtcggcgaagaggttaagtccgcgggctacggtccagttggcgcgtgcgaagaggttggcgtcctgcttgtccacgtcgttgtcgtaccagcgtttgctgcggtagtcggcgggatcggtctcctgcatccagtccagctcgccccagtggggacagctgtaatagctccacgaaccgccgaaggcgaggtcgaggttgtccgcggcgtaggccgccgcagcgttcaggccgcccaagtggttgcgcatgagtttttcgcggatcaggtccctgcgcacggcgatgcgttcgccgtcgccgtccgtcacgaaattgccttggtcgtcggtctggtaggccagatggtcggggaagaggtattcgaagagcttggcgtcgtccttgtactgcttgtagtagccgtaaccgtaggtgtagaaggccgtggcgctcagcgtccatcggtcgcccagccgctggctgaggatcagctggttgttgatctgcaggtagttgtcggtctcgtcgtcgtagaagttcacctgctgccactccccgtcctcgctgttccagatgcggtgggagtaggcgtccgaggtagagtacatgccgctgctgttgtaacggcggccattgagacgcatctcgtcgcgcgtggcgccgttgtagctgaggttggttttggccttgccgccgaacgaaaccagcttgagcatcgtgttgccgttgtaatagccgccttggaacatgtaggaggtgagggaggtccctccgcggcggatgtagccgtccgaggagaggcgcgtcaggcgtgcgtccaccgtccaatggccgcccatcagccccgacgagacgtgcacggcctgtttgttggtgttgtacgatccgtacgagagcgagacgtcgccgccgaactcggtttcgagcggggccgtggacatattgaccgcgccgccgaaggcgcccgtgccgttggtcgagatgcccgcgccgcgctggatctgcatcgtgccgaccgacgagatgaggtcgggcgtgtcgtaccagtacatcgagtgcgagtcggggttgttcatcgagacgccgttgatggtgacgttgagccgtgtggcgtcggttccgcgcaggcgcatcgacgtgccgccgatgccgatgcccgtttcgttggtggcgatcatcgagggagtcagcgccagcaccgacggaatgtcgaatccgtagctgttgcgggcgatcgcttcgtgcgaaaggtcggtataggcgaccggcgtgctgcccgatgcgcgcgtggcggtcacctcgatctcctgcaggcggtacatgcgcacggagtcttcgggccggcccggcccggcggctgccgtgatcgcttcgcttgtctttgcagggggaacggcagctgccgtgacaaacgccgcggatcgtgtcgcgtctgcggcggttgcggcgttcgttacgcctgcggtgagggagacggcagccggagtttcggccgcagcggtaattacggcgtttgccggattctcggcgtttgccggattctcggcgtttgccggattctcggcgctcgccgtgtttgcggcgacgcagagcgcgacggccgcgatgggaagtagaaaccttttcatgtctgaacttttaaaagttaatgaactgaaaaggggtatgcgttgaaagattatgcatcccggtttcggcattacccgtatccggttcaatgggtataatctcagcctgatagtaaggcaccccttcgaaatatcgacggcaaaggtaataaaagattcgggaaatcgggagcgggatgtgaagaatttctgaaaaactcagcaggtgcaagcaggaacggttgtccgatggtttcgtgacgataatgcaacgacgcgggcatgtgcccgcgtcgttgcactgcggccgatgacttttccttgcgaatcgggttcggactgctctttcggctcttttggtccgttgttctgctgcctgcgttgcccggttacgcctgcgtatccgcctgcccgccggcaacctgcgatgctcccggctttcggattgcgcctccggggtccttgctgtcggagatggccgggtgcctgagtctcccggccgggacgctctgttaccggcaatgcccggtctcaaggtccgcccggtccggttgcccgttgttgcgacgtccggtttttgccgcggctcagtcgccgtttttccgccagagtttcgacatctcttcgagggttctgcccttggtttcgggtacccatttccagacgaagagtgccgatgcgagcgccatcagggcatagatgcagtaggtgccaccgacgctccatgcactcagcgacgggaaggtcgccgagacgaggaaattcgagatccactgcgcagccacggctacggccacggcctgcgagcggatcgtgttggggaagatttcggagatcagcacccagcagatcgggccccacgacatcatgaacgatgcggtgtagatgatgatgaagaccagcgccgcaatgccgatcgacccggtgaacgaaagcgccgcaagggcggccatgccgatcatcatacccgccgaaccgacgatgagcagcggtttgcggcccacgcggtccacggtgaagatcgccacgaccgtaaagaggatgttgaccacgcccatcaccacggtctggagcatcgaagcgtcgcccgacgcgcccattccggcgaagatgcgcggggcgtagtagagcacgacgttgatgccgatggcctgctggaaaaacgagagcaggatgccgatcaggatcaccgctgcgccgtaggcgaagagccgctcggtcttggcgtgtaccgtccggcggatttcggtgtgaatcgtgcgggcctcggccgcgccgttgatgcgcgtgagcacctgcaatgccttctgatcgcgtccggtgagggtcaggtaacgcggggtttcgggcacgaagaggatcagcagcaggaaggtcgccgcggggaacgcttcgctgaggaacatcctgcgccagccgacggagaccctggcggcctgaatggcttcgcccgtgtcgcccagctggttgcggatcagatagttcacgaagtagacgaccagcatgccgaagatgatggcgaactggttgcacgagacgagcgtgccgcggatcttcgcgggcgagatttcggcaatgtacatcggacacacggccgaggcaagtcccacgccgataccgcccagaatgcggtagatgttgaacgacgccagcagcggcagcgacgcctcgccgtagggcaggatgccgctttcgggccgccacgagccgacggccgagacgaagaacagcacggccgccgcgacgagcgtgcgtttgcgtcccagacgcgaggccagcaggcccgacagcgcaccgccgacgatgcagcccaccagcgcgctcgatgcggtgaagccgtgcatccacggcgtgtaggtgaagtccgccgcactgcggaagaactggtctagggcctgctcggctcccgacaccacggccgtgtcgtaaccgaacagcaggccgccgatgatggccaccagcacgatcgaaagcagataggcgcggctcccggtttcttgggttttagtcataaggtcagatatacatgttcacgatcgcttcgaacagctcctgtttgccgctgcgctggacgggttcgtgccggcgggcgtagtcggcgacctgctccagcgtgagcttgccctcctcgaagagccggccttcgcctgagtcgtaggaggcgtaacgttcggcgagcatcttttcgtagggcgagtcgtcgagaatgtcggcggcgatgagcaacgcgcgggccatgacgtccatcgcggcgatgtgggcgatgaagatgtcttcggggtcggtcgaattgcggcgcgtcttggcgtcgaagttcgtgccgccgccctgcaggccgccgccgcggacgatgaccatcatcgcttgcaccatttcgtagaggtcgatcgggaactggtcggtgtcccagccgttctggtagtcgccgcggttggcgtcgatcgagccgagcatcccggcatcgacggcgcactgcaactcgtgctcgaaggtgtgtccggcaagcgtggcgtgattgacctcgatattgaccttgaaatccttgtccagcccgtgcgcccgcaggaacccgatgacggtctccgtgtcggcgtcgtactggtgcttcatcggctccatcggtttgggctcgatcaggaagttgcccttgaaccccttcgaacgggcgtagtcgcgggccatgcgcagcatggtggccatgtgctccttttcgcgcttcatgtcggtattgagcagcgacatgtagccttcgcgtccgccccagaagacgtagttctcgccgcccagaaagatcgtggcgtcgatggcgttcttgatctgcagcatggcgcgggccgcggcgtcgaagtcggggttggtcgcggcgccgttcatgtagcgggcgtggccgaagacgttggccgtgccccatagcagtttgatgccggtttcgtcctgcttctgcttggcgtaggctacgatctggcggaggttcttttcgtactcttcgggcgtcgcggcttcgtccacgaggtctacgtcgtggaaacaatagtactcgatgccgatcttccgcatgaattcgaaacccgcgtccatcttggctttcgcgcgctcgatcggacatgcggactcgttccacgggaaggttttggtgccgccgccgaactggtcgccgccttcggcgcagagggtgtgccaccacgccatcgagaaacggaaccaatccttcatcttgcggcctttcacgactttttcggggtcgtagtaacggaaagccatcgggttcttcgactccgggccttcgaattcgatctgtcccacggtggggaaatactgttttgatgccatgatattgaatgatttgttaagttgttattccattcttttctccacttcccggacccatgcccggtaaccttcttccagcgtctctctgtcagcttcggcgggttccacgacctccagcctgcgcaatgcggcgaacgcttcgccgcgcgtcttgtagtagccggcgcccagcgccgcgccgcgggctgcgcccagcgcgccgtcggtattgaacagttcgatgcgggcgcccgtgagcgtcgagagcgtctgccggaaaagcggcgagaggaacaagtttgctgcgcctgcgcggatgacgtcggggcgcactcccagcccgcgcatgatgtcgatgccgtagcggaaggagtaggcgatgccctcctgcgtcgcacgcaggaggtgcgccgtggtgtggcggttgaggtccagtccgatgattccggctccggggcagcggttgcagagcatccgttcggctccgttgccgaagggtacgaccgacagcccttcggaacctgccgggacgcttgcggccagccggttcatctccgcatagtcgagcctctcctgcgtgacgttgcggcgtatccacgagttcatgatgcccgtgccgttgatgcagagcagaatgccgtaacggggattgctggccgtgtgattgacgtggacgaaggtgttcacgcgcgactgcgggtcggcttggcgtttgtccgtgacgccgtataacacgccgctcgtgccgcctgttgcggcgacttcgcccgcctccatgacgttgagcgaaaaggcgttgttgggctggtccccggcgcggtaggagatcggagtgcctgcggggatgcccagcagccgttcggccgcttcgtccgtgcaggcctccgtgccgatcgagacgccggcttcggggatcgtctcctgcggaatgccgtaccacccggccacgaagtcggcccgccgctcctcttcgaagtcccagagtatctgctccgaaaggccgctgacggaggtggacatgcgtcccgaaaggcggtaggcgatgtagtcgccggggagcatgaatttgtatatctgcgcgaatatgccgggttcgttgcgccttacccacgccagtttcgacgcagtgaagttgcccggtgagttgagcgtatgcgcgagacagaactcccgtccgatgccttccagcgcttcggccccgatctccacggcgcgcgagtcgcaccagatgattgaggggcgcagcgggcgtccttgcctgtcgagacagaccagtccgtgcatctggtaggtgatgcccaccgacaccacgtcgctcattgcaaagccctgcgccgcaatggtccgaatgccttcgcagacgtaatgccaccacatttcggggtcctgctcggcccagccgctctgcggcgatccgatgggcatttcggtcgcggggttggcggacgaggccgcgcactcgcccgacgcgatgtccagcaacgataccttgaccgacgaagagcctatgtctatgcctaaacttttcatatgttatctgttgttatggatcaatacctccagttgttgatgaatcccagcttcagcttcgccttgagcgcctttttgtaggcgtttttattaaaggtataatattgcgccggcttgtgggctacgccctgttcccgttctgcggtcggggtcagaaaccccgacgcgagtatcttcttgcggaagttgcggttgtcgatttcgatgcccagcactgcgctgtagaggttttggagcgcgcggatggtgagtttgcgtggcagcagttcgaaagccacgggcgattgcagcatctcgcggcagagaaccgccagcgccgccgaaagtatctgcttgtggtccatcgccagccgctggatcgaatcgacatcgacccattgcgcgcccttggccgtggtgtaggcgacggtacgggtgtcgagcttcaccagcgcgtaatatcccaccgtcaccacgcgttcggtccgtatgccgtgatagcggttgatccactccagctcctcaccgctcacccggttgggatcggagaatatatccatctgtttgaggtatacgtcccgcagtccggtggcctcttcgagcacacggtaggcggcctgcggcagcgtctcgttgtcgagaatcatggcgcccggcagtttgagcttgtcgagacgggtgtcgggggcatagtagcgccgctcgatcagcagcactttgagcgacttgccgttgaaaccgaacacggcgcagtctaccgacagcgattggttcatctggatggacatggggctggttttaggttgcagacgtaaaattatccattcggcggatgaaaaacaaacttacggccgtttttacgctaactgttcggcgcgtatgcgcccctcggcccggtgagcgtccgattacgggcgtcggacaatagtcgcttttttacgctaagtcatttccggctgcgcggcggatcgtaagtaacgcggataacgcagtaacgcgggcgtatgcccgcgttactgcgttattgccgagcagcgtatctgcccgtgtccggccggtgccgggagtttgttttggttgcgccgcggttctccgccgcctatgcgaaagtcccgaaccggaatacgattttctgacagtaggtttcgccgggtctgagcagcggcgacgggaattcggggtggttgacggcgtcggggtggttttgacattcgatcgccacgccgtcgtagtcgttgtaacggccgcccgacttggtttcggggcatccgcccgcgagccagttgccggtgtagatcatcacgctgggctgcgacgaaagcaccgtcacgcagcggcccgaagtatgttcgcgcagacagccgacctcgcccagaatgttgggcttccagccgtcgatgacgaacgggtggtcgtaccccttgaaatcgcggatgtggttgaactccgagtcgatgccggggcggaacggacggaattcgcggaagtcctgcggcgtgcccgctgcgtcgagcagccggcctgtggggatctgcttgtcgttcatttcgagcacctgcgagctgttcaggcgcagctggtggtcgaggaccgacccgctgccttcgcccgcgaggttgaaatagacgtggttggtgaggttcaccaccgtcgttttgtccgtccgggccagataggttatttcgagcgcattctcatcgtcgaaatcgaacacggcctcgacgttcagttcgccggggtaattctggtcgccgtcctccgaaaggagcgacatgaccacgcggttggtctccacacggctctcccagatgcggttggcgaagttcttcgtgccgccgtgcaggtggttggggccgttgttcacttcgagcgcgtactcctttccctcgacggtcatgcggccgaaggcgatgcggttggcgcagcggcccacgctcttgcccgacgcggctccgtcgaagaagtagccttcgggatgcttgtagcccagcaccacgtcggccatgcggccctcacggtcgggcatcgtgacggagacgatggcggccccgaaattcgagattttcacttcggcgcccttatcgttgcgcatcgtgtagaggatgatggcttcgccctccggcgtcatgccccatacgtgttgttcgatctgtaccattattctgcgggttttaaggttgcgaggatatggtcgatgcggcgcagggtctcttcgcggccgatgaacgccgtgacgtcgtacatgccgggacctttgcccgcgcctacgagcgccagccgcagcgtgttcatcacctgtcccatgccgtatcccttctcttcgatccagccgtggacgatttgttcggtgttctctttcgagaagtcgtcgatcgaggccagtacgccgcgcagctcgcgcaggatttcggggttttggcccttccagtacttccgggtctgcttctcctcgtattcggccggcgccgtgaagaagaacgacgtgaggtcccagaggtcggtgatgaacgtggcgcgctccttcatgatgcctgcggcccggcctgcgacctcgtccgcgacttcgataccgtggtcgcgcaggatgggctggaacagcgcagccagctcggcgtcgctcttgtggtgcatgtactgggcgttgaaccatttggctttgtcgggctggaagcgtgcgcccgatttcgagacgcgctccagcgagaagctgtcgatcagctcttgcatcgagaagatctcctgttcggtgccggggttccagcccagcagcgccagcatgttgatgaatgcttcggggaaatagccgtcctcgcggtagccgcgggccgtttcgcccgtcggggaggtccagaagagcgggaataccgggaatcccatcttgtcgccgtcgcgcttcgagagtttgccgccgcccgtgggtttgaggagcaggggcaggtgggcgaagcggggctgacgctcctgccagccgaaggcccggtagagcaggtagtgcagcggcagcgaaggcagccactcctcgccgcggatgacgtgcgagacctccattaggtagtcgtccacgatgttggcgaggtggtaggtgggcagtgcgtcggccgatttgtaaagcaccttgtcgtcgagcgtcgaggtgttcacctccacatggccgcggatcaggtcgtccatttcgacggtctggttttcgggcatccggaagcggatcacccactggtcgccgcgttcgatgcgtgccttcacctcgtcggccggcagcgccagcgacgtggccagcttttcgcgcacggcataattgtaggcgaacgcttcgccgcgctcctcggcttcgcggcgcagggcgtccagctcttcggcggtgtcgaaagcgtagtaggcccagcctgcatcgacgagctggagggcgtatttgaggtagatttcgcggcgttcgctctggcggtagggggcgtggggacctcccgcgccgacgccttcgtcgatctcgatgccgcaccatttgagcgattcgaggatatactcttcggcgcccggcacgaaacgctgcgagtcggtgtcctcgatgcggaggatcatcacaccgccgtgctgacgggcgaaaaggtagttgtagagggccgtgcggacgccgccgatgtggagcggccccgtggggctgggtgcaaagcgcactcttacgggtctggacataatgatatgctgtttatatattgttccgtgtttggtctctcttcgggtcagacgttgaacaggaagtgcatgatgtcgccgtcctgcacgacgtactccttgccttcgacgccgatcttgcccgcgtcgcggcaggctttttccgaccccagcgtcacgtagtcgtcgtatttgatcacttcggcgcggatgaatcccttctcgaaatcggtgtggatgacgccggccgtctgcggggccttcatgccgcggacgtaggtccatgcgcgcgactcgtcggcgccggtggtgaagaacgtttcgaggttgagcagtttgtaggccgatttgatcaggcgctcgacgcccgactcttcgaggccgaggtcttcgaggaacatctgccgctcctcgtagctttccagctcggcgatgtcggcttcggtggcggcggcgacgatgagcatttcggctttttcgtcggcgatggccgcacggaccgcctcggtgtaggcgttgcccgtagcggcgctcttttcatcgacgttgcagacgtacagcaccggtttgtcggtcagcaggttgaggtcggcgaccagtttgcggtcctccttctccagttcgaccgtgcgggcgctgcggccctgctccagcaccgatttgtattgcagcagcagttcgacctgacgtttggcgttcttgtcgccgcccacggccgcctgcttctgggtcttgcccagccggttttcgatcgtttcgaggtccttgagctgcagctcggtgtcgatgatgcccttgtcgcgcacggggtcgatcgagccgtccacatgggtgatgttgccgttgtcgaagcagcgcagtacgtggatgatggcgtgcgtgttgcggatgttggcgaggaacttgttgcccagtccttcgcctttcgacgcgcctttgaccagtccggcgatatcgacgatttcgatggtggtcggaatcacccgcttgggtttgtcgatctcggccagccggacgagccgccggtcggggacggtgattacgcccacgttgggttcgatggtgcaaaagggaaagttcgccgcctgcgccttcgcgttggacaggcagttgaaaagggtcgatttgccgacgttcggaagacccacgatgccacactgtaaagccattgaattatcttgtttgtttcgaatcggttgtctgcggcccggagcgttccgtacggacggcggttgtcgcgtgtccggcatcttccgcgcatcctgcaccgcaggcggtgcgggcgacggttgctgcgtgtcctgcgcattaagcgtgtgcggacggaggtttgcgtgcgttcagcatccgctgcgcgtcctgcgcggacgtcggcgatgctgcccggcagcatccggcgggaactctcctgcgggccgaagcgcaaagatactaatttcttttcatatatgtattggctcgctctccgatgatgaaaaatattgctccggcttaggggctgtctgtggcgcgggtgtgtattatcgtgaacggtccggccggccgctggtttcggttcggaagtttttatttccgatccgatgcttttcggaatatttttactttctttgcataaaccattaaaacttcaacccgatgaaaaaaactcttgttgccgtgctggcggtcgcgttcgtatcgtccgccgccgcgcagcctatcccgccgcaggccaaagagcgcgccgccgaactggtcggacagatgactctcgatgaaaaaatcgattatatcggcggttacaacgaattctatatcagggccgttccgcgtctgggcattcccgaaatccggatggccgacggtccgcagggcgtacgcaacaatacccgcagtacgatgttcccctgcggcgtggccgccgcggcgacttgggaccgggcgctggtgcgcgatatgggacgcggtctggggcaggacgcccgcgcccgcggcgtgcatatcatgctgggacccggcgtcaatatctaccgttcgcccctgtgcggccgtaacttcgagtacttcggcgaggacccctatctggcgtcggagaccgccgtgcagtatatcgagggcatgcagtccgaaggagttatggcgacgatcaaacactttgcgggcaacaatcaggagtgggaccgtcatcaggtgagttccgatatcgacgagcgtacgctccatgaaatttatctcccggccttccgcaaggcggtcgagcaggccggcgtgggcgccgtgatgtcgagttacaacctcgtcaacggccagcatgcgaccgagaacgagcagcttgcggtcgatattctgcgcgggatgtggggcttcgaaggaatcttcatgtccgactggaacgccacctattcggccgagggcgccgccaaccggggactcgatctggagatgccgagcgcccggtttatgaacgcccgcaacctgcgtccgctcatcgaatcgggcgtggtgtcggaacgtacgatcgacctgaaatgtcagcatatcctccagacgctcatcgcgttcggatttttggaccgccaacagctcgaccccgctattcccgaatgcaatcccttctcggacgctgcggcgctcgacgtggcgcgcgggggtgtggtgctgctcaagaacgacggggctttcctgccgctgaccaaacagcgcgatatcgtggtgctgggacccaattcgggcaatatcccgacgggcggcggcagcggtttcgtgcatcccttctcgacggtttcggtcggcgagggcatgcagatgatgggcaagaaatacagggtgacggttttgggcaatctcccttcggcgagcgatatggccgctcagggcatggtctacacctcggccgactgcaaaacgccgggactcaggggcgagtacttcgccaacaagcgtttcgagggaactcccgcgctgacgcgcgtcgatacgagaatcggcttcaactggaaggataaggcgccggccgaagggcttcccgccgacggcttctcgatccgctggaccggcgtgttcgttcccgaatccgactgcacggcttcgctggtcatgcgcggcgacgacggttaccggctcttcgtggacggcgaagaggtgctcgccgactggggcaaccacagcgcgacgacccgcaaggggagcgtcgaaatgaaggccggccggaaatacgcgctgcggttggaatatttcgacaacgcctcgtcggccgaggtgtcgttcggctatatgaccgccgatccccgcgccgaggatgcccggatcgtccgggccgacgccgtgatctactgcgccggattcgacagctccaacgaaaaggagaattccgatcggacctttgcgctgcccgaagggcagtccgaagagatcgcccggctcgcggcgctcaacgagaatctgatcgtggtcgtcaacagcggcggcggtgtcgatttctcgacgttcgacgataaggctaaagcgattctgatggcgtggtatcccggacagcagggcggtcaggcgatcgccgagatcgtaacggggcggatctcgcccagcggccgcctgccgatctccgtcgagcgccgcgccgaggacaatccgacgctgggcagctattacgagaatgtggcgcgcacccaccgcaagaacaccctgcagaagcgcgttacttataatgaaggcgtgtttgtcggctaccgcggttacgagcgcagcggggtgaagccgctctatcccttcggttacggactgagctattcgacgttcgagtattcggacctgaaggtcgagaagtgcgacggcggggtggtcgtgtcgttcgccgtgaggaacacgggcggtatggacgccgccgaggtggcgcaggtctatgtgggcgacgtcgaagccagcgtgccgcgtcctgccaaggagttgaaaggttatgagaaaatcttcctgaagaaaggcgaacaaaagcgcgtcgaagtgatgctgaccgacgaagccttccgcttctacgacatcttctcgcacgggttcgtgaccgagccgggcgacttcaacatcttcgtgggatcgtcgtgcgaggatatccgcctgcggggcggtgtgacgctctgaccgcaggacggtcgaacagaactaagcggcggcctttgaggggccgctgcttttttttgtgcatggatttgcggggcggttggcgggtatgacagttggccgtataattaatgaaaccggcggaaaagacaggaggggaggtattgggaattcgggcgcccggatattgggaacggcccgccgggcggatcaccgtcttttgggcgcgaactgttcgcggtattccgagggggtgatgcccttgagctggcggaaggtgcgcgagacgttcttgatgtcggagaaccccagctcggcggccgcttcggagacgctctggccttcgcagagcagctgcatcatcttttcgatgcggacctgtatgatatagtcgtagatggaggtgcccatgctcttcttgaaacgggtttcgagcaggcggcgcgacagggggaccagcttcacgagttcgttgaccgtgattttctggctgatgttctcatggatgtagcgcagcacttcggcgatgtgcggatcgttgttggcgtagatgtcggtcgattgccgcgtgacgatgtgggtcggcatcaccatgacgtcctcccactccgcttcggggttacggatcagccggtcgatcaggcgcgccacgtcgtagccgccctgctcgacgccctgattgagcgacgaaaggttgggggtggagagcttgcagatcgtctcgtcgttgtccacgcccagaatggcgatgtcgttcgggatgcgggaatttccccccccctcgatctgcaggcacgcctcggtgatatgatatgcttggttgtcgtcgcacgccatgatcgccaccggcttgggcagcgactgcagccacgtgatgagctgcgtcgagtcgtagtaccacaaatcgttctgggcgctgctgcgcagcgacgaaaaggtgaattcgggattcgccgcctcgatcgtctcgcggaagccctgacagcgttcgtccgagaagtcgatgccccgcgtgccgtagaaggcgaagttgcggaagcccttttgcagaaaatactcggcggccatcctgcccgccgaatagtgcggtccggtgatgttggggatggtggtgaagcgtttcttgaagtcctgtgcgatggctatgatcccgtttttgcggaacagttcgacgttgtcggtgttgtagaactggccgatcacggcgtcggccttcatgcgcacggcccactccacgacggcttcgatgccgaatttgtcgcgtatcgacagcggcaggcggcacaggctccatgcctgcgccgtgtcgtgcgcatagcgcgccatgccgaggagcagttctcgtgcgtacgcttcggaaaagtcggtcaggaaaattacgcgtgccatcgttcgggtagtgtccgttcgacggtaaaggtagcttttttttcggaaatccgggcggtttctgcgatttttcggcggcggatcggggcgtttcgggggcgccgggcgggaaatgacggttctgcgcgatttgaggaagtaaaagcgcaaatagccacggcagggtgcaatcgcttctctatatttgtatgacctaaactgcgaccggcttcggacagacgaagagagaagggcgcggagttgcaatatcgctccggaatccgtacctttgatttgtattttccggacggttcgcactaccgactactgttatgaccaaaaaacttacccttctgctgctggccctcgcggcccttggctgttcgccgcggtccgccgatcccgtcgattatgtgaacccgttcatcggcaccggattccacgggcatacctatccgggcgcgaccacgcctttcggcatggtgcagctgagtcccgacacccgcgccggcaactgggacgcctgcgccggctaccattacagcgacacgacgatcgacggcttttcgcatacgcacctgagcggtacgggatgcgccgaccttgcggacattctgttccatccgaccacgcgcgaaatcgtgatccacgacggcgagtgcgtcttgcagccctatttcttttcgcatgacgacgagcgggcttcgtgcggctactacgccgtgacgctgcccgacgtgaatgtcggggtcgaactgaccgccgcgccccgtacgggcgtacaccgctatacctttgcgggcaaaggtccccggcgggtgatcgtcgatctgctgcatacggtcaccgaggagaagatcgacctgtgcgaactccgccggacggctccctacgagctggtcggcatgcgccgcacgcaggggtgggtgcccgatcagtatgtattcttcgcggcccgcttctcggagccgttcgccgacgtgcagctgttgggggacaagcaggccgtgctgaccttcgcgcccgacgtgcggacgctcacgatcgccgtgggattgtcgtccgtcagtgtcgaaaacgcccgtatgaattcgcttgcggaggttcccgaactggatttcgacgccgtgcatgcccgcgccgtcgggcagtggcgcaaagcgctgggcgacatcgtcgtcgaaggcggctcgcgcgacgagatgaccaacttctatacggcgcagtaccatacgaaactgacgcccaacctgatgagcgacgtgaacggcgagtaccgccgccatgaccagaccgtcgcgcggatgcccgaaggggagtcctactactcgacgttctcgctgtgggatactttccgggcgtggaatccgctccagacgctggtcgataccgcgctggtgaacgacatgatccgcagcatgctcgacatgtacgattcaacgggcgaacttccgatctggccgctggcttcgggcgagacgggcacgatgatcggctaccatgccgtgtcggtcatcgccgacgcctacctgaagggaattcgcggctatgatgccgacaaggcgctggaggcgatgatccgttcgtcgaacatcaataagaaaggttcggactattatacggcgcaggggtatattccctccaatatcaagcgcgaatcggtctcctgtacgctggaatacgcctacgacgactgggcgatcgcccgcatggcgcaggctatgggccgcgacgacgtgttcggggaatacgcgcggcgggcgctcaactatgtgaatgttttcgacggctcgatctgctttttccgcggccgtcagtccgacggcaactggtccgcgccgttcgaagagttcgctacgggccgcgactataccgaggccacgccgtggcactaccgcttcttcgtgccgcacgacgtgaacggcttgatccagcttttcggcagccgcgaggcgttcatccgtgaaatggaccggctctttacgctcgaatcggacgaaatgcagctcgacgtgagcgacgtgacggggctgatggggcagtacgcccacggcaacgagccgagccaccatatggcttacctttataattatgtgggacagccgtggaagacgcaggagctgacgcgccgcctgctgcacgagatgtacgccccgacgcccgaaggcatcatcggcaacgaggactgcggccagatgtcggcatggtacgtcttctccagtctgggcttctatcccgtatgtcccggctcgaacgaattcgcgctgaccgcgccccagttcccgaaagccgtcgtgcggctggccaacggccgtacgctgacccttacggccgacaatccgcgccgcagcgtctatatcgcttcggtgacgctcgacgggaagccgatcgaccggaactacatcacctacgacgagctgatgcagggcggcgagctgcactatgcgctccggccgcgccccgattacgaacgcgggacggacgatgcggccgcgccccattcgctgacccgcggcgaggtggtttcgattccctataccacgcagaacgtgagcctgttcaccgagccgctcgccgtcgctctggcgacgacgacctccggagcggaaatccgctatacgctcgacggctcggaacccaccgaaacgtcggcgctctacgccgctcccgtgccggtggaccgttcgctgacgctcaaggccaaaggattcaaacccggcgctgcgcctagtcgtacgctgacgctcgaagccgagaaagcggtgttccgccggggtatgcccgcagagaccgccacgcgtcccggcgtcgcttacagctattacgaaggcgttttctcgtgtgtgaacgatattcggaagggaaaatacgtgtcgtccggcacgatgcctgcgccctcgatcgcccaagctccgcaggaggaccacttcgcctatgtctttacgggattgatcctcattccggagcggggcatttgggagttcatgaccaagagcgacgacggcagcgtgctgatgatcggcgaccgtagggtggtggacaacgacgggtcccacgcttcggtcatggcgaccggacgcgtggcgctcgaagcgggactgcacccttacacgctgctctatttcgaggattacgaaggacaggacctcgcgtggggctggaaagcgcccggagcggagggcttcgaagcgatccccgaagcgaatctgcggctgacgaattgacggaaatattgtatttacataaaaaaacaggggactatgaaacgattgatctatcttcttgcggcggttgcgttcaccgcctgcggctcggcgacttcgctcagcgtgatgaccttcaacatgcgttacgacaatcccgaagacgggcagaacaactggcgtttccgccgcgaacgggtcgccggggtgattaaggcgcaggaggtcgatgtgctcggcacgcaggagctgctttccaaccagttcaatgatctgagcggtctgctgaccgggtatcaaggagtgggcgtcggacggctggacggcgccgagtcgggcgaatactgcgccgtgttcttcaggaaggaccgcttcacgctgctcgattcgggaacgttctggctgagcgagacccccgaagtggtggggtcgctgggatgggacggcgcctgcgagcgaatcgccacatgggtcgtgttgcgcgacagggacggccgggaactcttcttcatcgacacccatctcgaccatgtcgggcaggtggcgcgcgacgagggcgtgagcctgctgatgaagcgcatcgaaaccctgagcggaggacgtcctgtgatcctgacgggcgacttcaattcggaacccggatcgtcggtggtggcccatgtgcagaaggacggcgtgctgcacgacgcgaaggcgatcgcggcgcagcggtcgggaaccgactggagtttctccgatttcggacagattcccgaagccgagcgtcccctgctggattatatcttcgtgagcggcgacatcgaagccgtccgctatgaagtgctgcccgacaccttcgacggcggctatgtttccgaccacgctccggtgatggccgttgtcaaaatcgctaaatgactccgacgatgaaaaggatactgaaaagctggctgctggctgcggcattgtgcttctgcgtaacggctgcggccgaacggcccgtgctgatccattcgcacaacgattattgccgccgcgctcctttctggcaggcgtacgctcagggagtctattcgatcgaagccgacgtgtttctgcacgacggtaaactgctggtcggacacgatgtcgaggacctttcgcccgatatgactttcgagtcgctctatgtcgagccgatcgtgacgctttttaagcgtaacggcggccgtgcatggaaagattcggacgagcagctgcaactgatggtcgaactcaaatcggcgaccgaaccgacgctgcaggccgttacggcgctgctgggccgttatcccgaagtcttcgacccgaccgtgaatcccgaagccgtgcgtatcgccgttacgggacgggttcctgcgcctgcggatttcggcaaatatcccgcctatgtccgtttcgacggcaactgggaggtcgattacactccggcccagctggaacgtatcgcccttgtaagcgccgatttcaaggattattcgcagtggaacggcaaaggctcgatcattcccgtcgagcgcgtgaagctggaaaagatcatcgaccgcgcccacggctggggcaagcccgtgcgtttctggggcgctcccgaaggaacgacggtctattatacgttctacgacatggggatcgactacatcaacaccgaccgtccggaggtctgcgccggattcttcgacgatttcggcaacaagaatttccagatcggccagcgccgtacgtccgtcggtggcgtgaccggcacgaagcgtctggacaagaccacgcgcgatttcaggggatttcagaacgataaactgcagctcaccgagggtatcgacgtttacacgccgacctatcgaaacgacggcggcagggggaaagtcaaaaacgtgatctacctgatcggcgacggcatgggcctttcgcagatcgtggccgcgttttatgccaacaaggggctttcgacgctgcagatgaagtatatgggcctgcagcagaataatgcgctggatgccttcacgaccgactcggccgcgggcggcagtgcgctggcgacgggcgaacgtcacgataaccgccatatttcgatgagttccgaaggcgagccgtatccttcgctgagcgactttttccatgacaaggggatgccggtgggcgtgctgacgctcggcaatgtcgccgatgccacgccgacggccttctacggacattcggtcgaacgcgacaacgccgacgagctgacccgctgcctgatggacggccgcgtggacctgctctgcggcagcggcatccgcgaattcacccgccgcagcgacggcgtggagctgatctccgagctgaaaaaacagtatgacttcgtgcgttcggtcgacgagatcaaggcccggaaaggcaaggtgatctgcattgacgagacgatggacgatgccgccgagcaggccaacctcaccttgctggccgacgccacgagggcttcgatcgccaaactgcaggagcagggcggcaaaggcttcttcctgatggtcgagggcgccaagatcgactatgccggccattcgcgctgcctgcccggctcaattatcgaaatgctgagcttcgacctcgccgtggccgaagcgctgaaattcgccgaccgaaacggcgagacgctcgtcgtggtcacggccgaccacgagacgggcggactggtgctggtggacggcgacgagcggacgggccgcgtgatgggcgtctatgtctccgacgaccatacccccgcgatgcttcccgtattcgcatacggtcccggagccgacaagttctgcggtacgtatatgaatacggagatcgcccgcaggatcaaatcgctgataaaataaaccgcatattatgacgctacgcaaacaaatcgcggcgcttctgccgctggtcttcgcagcgggagcggccggagcgcagggccttaaatcgggtccttacgagctgccttacaagaatacctatgtaaaggaggtcttcgtggccgaaaacgaattccggaccgccaagcccgaaaccatcaagccccgttcgttcgccgaggcccgcaagatcctgcccgcacccgtgtgggaggggcacgacaaagagatcgagatgtactggcatgcttggcggatcgccgtgggcaacatccgccagccgcaggagggatcggaattcgtctcgccgtatctggatatcgcctacaacggcaatattttcatgtgggacgcctcgttcatgatgatgttcgcccgctacggctaccgcttcttcccgttccagcgttcgctggacaacttctatgcgaagcagcaccccgacggcttcatctgccgcgaaatccgggccgacggctccgactgtttcgagcgttacgatccgacttcgaccggcccgaacctgctgccgtgggtcgagctgacgtactaccgccagttcggcgatatcgaccgcctgcacaaggtcttccccgcgctgtgcgcctacgccaaatggtggcggctcaaccgcacgtggcccgacggcacctattggtcgagcggctggggaacgggcatggacaacatgccccgcgagaagcccgaatacaacccgatcttttcgcacggacatatggtctggctcgacaccaacctgcagcagatgctggtagacgagtcgctgctgaacatcggtttctatatcgaacgctggcaggagatcgaggatatggaggacgagatgaagcggctgcgcgcctatgtgaacgaacatctctgggacgagcggacggctttcctgtacgaccgctacggcgacggaacgctctgcacgaccaagggaatcggcgcattctgggctttgcaggccgatgcgctggacaaggagcggctcgaccgcatggtggcgcatctgagcgatacgaccgagttcgaccgtccgcaccgcgtgccgtcgctctcggccgaccatccgaaatacaatccgctgggccgctactggcagggcggcgtatggcccggtacgaattacatgaccatcgacggcctttaccgtaagggctatcacgaccttgcgcgggagatcgccgcgaaccattacgccgcagtcttcgaggtgtggaagaataccggcaccttctgggagtactacgccccggagaagatcgaacccggattcatggcacgcaaggacttcgtgggctggaccggacttccgcccatcgccgtcttcatcgagtatatcctcggcgtgaagtcggattactccgaaggccgcatcgtgtgggacatcgagcataccgaggcccacggcatcgaacgctatccctacgggccggacggcgtcgtggggctgaaggtcaaacggcgcgcttcggccggcgagacgccctccgtgagcgttgagaccaacgtgcccttcgacctgacggtgacgtggggcgacggccggagccgtacggtccgcgtggagaagagtggcagcgtgaaactgaactgagcaacccaacctgcttatgaaaaagataacgacacttatgtgcgccgttgccttgtggtgctcggcgcaggcgcagaggcccgctctggaattcaacggggaggggaaattcaagatcgcgcagttcaccgacgtgcacctcgatctggggaatccctaccggcaggcgcaggcggagaagacgatcgctcagatgcgttatatcctcgatgcggagcggcccgatctggtcgtcttcacgggcgacgtggtgacgggaaaacctgccgccgaagggtggaagcgcgtgctggcgcccgttgcggagcgtaacctgccgttctgcgtggtgctgggcaaccacgacgccgaacaggatattccgcgcgccggaatcggccgcatcgtcacttcgtatgccgggacgctcaacacgctgaacgccgacggcgaactggccgacgtggtgctggagatcgccgggaagaaatcgcctgcggcgttgctttactgcctcgattcgcacgactattcgactgtcgagggtatcgacggttacggctggttcacgcaggatcagatacgctggtaccgcgaccggagcgccgcctataccggggccaacggcgggaaaccgttgccggcgctggcctttttccatatcgccctgcccgaatacgtcgcggcgtggcgcaatcccgacaatacgcatatcggccgcgccgccgaggacgagtgtccgggcgagctgaatcccggcatgttcgcggcaatggtcgagagcggcgacgtgacgggggtgttcgtggggcatgaccacgacatcgactacgtcgttgccgagaagggtatagcgctcggatacggacgtttttcgggcgacgatacgacctacaacaacttgcgccccggcgtgcgtctgctggtgctgaccgaaggcgaacggggcttcgagacgtggattcacgagcgcgacggacggatcgtcgatcacgtggagttccgcgacggcaggatcagcaaagtcaagaacagcaattaacagacaagagatgagaataggcgtggatttgggcggcacgaacgtgcgcgccggccttgtgaaagacggacatatcgtgcggctgctttccgaaccctgcaaagccgaccgtcccgaaggggaggtggtggatcatatcgcatcgcttatcggggagcttatgcgacctgaggtttcgcggatcggtatcggcgtgccgtcggtggtggacgctgcgcggggaatcgtatataatgtggtgggcatcccttcgtggcgcgaggtttacctcaaagacctgctcgaaaagcgtttcagcgtgccggtgcatgtcaacaacgactgcaactgttttgcgctgggcgtctgccgcttcggcgaggcgagcgcgttcagcgacgtggtgtgcgtggcgctcggcacgggcgtcggcgcgggagtcgtgatcggcgggaaactctactgcggccgggacaccggggcgggggagatcggaagcatcccgtatctggaccgggattacgaatactattgcagcagccgcttcttcgtgggccgcggcacgacgggcaaggaggcttacgagcgcgccgcggcgggcgatcccgaagcgttggcgctttggcgcgagttcggggggcatgtcggccagctggtgatgctggtgctctatacgtacgaccccgaagcgatcgtcttcggcggcagcatcgcccatgcgttcggctttttccgtgaagcgatgtacgaacagctgaaacggttcccctatgccaagaccgtcgagggactgcatatctgctgttcgaatatcgaccacgtaggactgctgggagcttcggcctgcgaataaatgaggcggtgctttggcgaaatccgtttttttgttatatttaccgggtaagttgcaccgaaacccacgaaaacgatccgatatgaagagacttttacctgttttggcattgttcgccgtattgtgcggctgttgcagttgcggcagggtgattccgaccgacggcgaagtggctgtcgtgccgctcccggagcatatcgtggaggggcagggcaccttccgcctgacctccgacgccgaggtggtcctgctgttcgacgacgagcgtctgtccggcgtgactgccgcgctgaacaaggtgctgatgccgctgttcggccgcggcccgcgggtaaggcatgccgacaaggctgcggaccatgcggtgaacgtcacccgcgacgagacgatgcctgcggaggcctaccgccttttcgtaactccctgccggatcgatatcgtcgccggaggagcgcagggggcgttctatgccgtgcagacgctgcgccagctgcttccggcggcagcgtacgaagccgacgacgtgcgggccgtcgaactgcccgtcgtcacgatcgaggacaaaccgtgtctgggctaccggggcatgatgctcgatgtcggccgtcacttcttcacggtcgatgaggtgaaggaggcgctcgacatcatggccctgcacaaactcaacgtcttccactggcatctgaccgatgatcaggggtggcgcatcgaaatcaggaaatatccgaaactcaccgaaataggttccgtacgcagccgtacgctgatcggccgcgatccgggcggcacgtacgacgagaactgcaaattcgacgaaacgccttacggcggttactatacgcaggatgagatccgcgacgtggtgaattacgctgcggagcgtttcatcacggtgattcccgaaatcgaatttccggggcatgccgtcggggcgctggcctcctatccgtggctgggctgtacgggcgagcagtacgaagtgcgccagacatgggacatcgacgaccgggttttctgcatcggcaaggagacgacgttcgaattcatcgagggcgtgctcgaagaggtgttggagctgtttccctcggagtatatccatatcggcggcgacgagtgcccgacggtgatgtggaagaaatgcccgcattgcaaagcgcgcatgaaggccgagcggctgaagcggccgcgccggttgcagaactatgccacggcccgcgtcgagaaattcctcaacgcccacggacgcaggctgatcggttgggacgagatactggagggcgaagtgacgccgacggccacgatcatgtcgtggcggggcgccgaaggcggcatcaaggctgcgaagatgggcaaccacgccatcatggctccgacgacgcactgctatctggactattaccagacgcgcgatacggctggggaaccgctcgccatcggcggttatctgcctgtggagaaggtctattcgctcgatccttacgagatgctgacggctgacgaacagcgctgtatactgggcgtgcaggccaacctctggaccgagtacatcgccacgtggccccatgccgaatacatgctgctgccgcgcctgagcgcgctggccgaagtggggtggagtctcgaccggaaggattacggcgactacctgcgccgcgtacgccggctggcgaagatttacgacgcctgcggatataattatgcgaaacatatcttcgggaagtgacatgttttccgcagacggaatagggggacgatgcgtatgccgtccccttttccgtttcccggcggcaacggggaggggctgcgatattatatgggtgattccgctgggtagttcgtaaatttttcctatctttgagggcaaaaagtgtacggatcatggatttgaaatacgtgcggagcgaattgcagaagctctctgaaatcatagacaattgggacaccccgcaggagaccgcggccctcgaacgggatctggtgctcgaaaaactgcggaagttatacgatgccgtgcgtttcggcgcggatgcggactttgcggctgtccgcgaagatgcggcggaagaggccgtggcggagcctgctccggccgaaattccggtcagcatcgatctcggcgaaatgctttcgctcgacccgttcgcggttgaggcgcaggccgaaccggatgctgccgccaaacgggacgctgttggcgaagcgggtgcggcttttgagtcggaatcttttgccgaggcgggggcgtcctttgagtcggagtcagtcgccgaagctggtgcggtctccgagtcggaatccgtttccgagccggaaccggagacggtgccggaatcgaagtctgagttcgggtccggacaggccgtcgaaacgggcgtaaatttcgcagggcattccgaacctgccgaagaactggctgccgaacctgaagttgttgtcgattctgccgaagcatttgttgcgcagtccgattccgacggcgggacgaacccgatttcagaaccggaaatctctgccgctgaacccgtgaccgaatccggaccggttgcttctgagcctgaatccgagctttccattgaggagacggctccggcagaacccgttgccggaaatgccgcggaaccagccgccgagcagtcagtgccgctgccggaaactgtccgagaaccggaggaagcgtccgaaaagcccgaattcattgctgaacccgtcgtcgaatccgcgaccgaatctttcgcagagtcgctttccgaatccgttgcggagtccgtctcagaacccgctgccgagtcggttgtcgagtccgttgcggagtccgtcgtcgagtttccagccgaccccgtcttagaacccgctgccgagtcggttgtcgagtcacattccgagtcggttgcagagcctgccgccgaatcagccgccgcacctgcgccgtccgtcgatgcggaacagacttcggcgcaggaagctcctgccaaagccgaagcgcattccgcgccgggaactcaacccatagctccgacactgttcgaactggaagaggagactgtccgtcaccgccataaacagcgcgtcatcatgtcgctatataatacggagcctgcggcgcctgccccgaaacccgcatccgttccggcccttgagcctaccggaaaacctgttgcgggagggaagcctgcggccgaagcgtcgttcgcacaaccggcggtggccggttccgcgtcatccggttccgcagcgtccgactctgcatcggccggaactgccgccgccggagtctccgtttccgacgcaactgccggagccgccctttctgcaactccatttacggcgcccgtgacggaacccgcagcatccgcgacaactcctgtcggctctgtgacaacctctctcggctccgcgacaacctctgcacccggaccggacgcttttgcatcgcggactccggttgccgctccgcagccgaaagcggccgaaacgactgcgcccgacaatgccggggatgacgacgagcctgatttcgaagagatcacgctcgaagcgaaaaacacctccggcgccgtattgggcgaggtgatcaaccacaatgtgcagacactggccgacacgatcgcgccgccgcgcgacgtggcgtccgaactgcgtcgcagcgaacacgttaccgacctgcgccgcgccatcggcatcaacgacaagttcctgatgatccgcgacttgttcggcggcgatgcagcggcttacgaggcggcgatcggaacgctcaacggtttcgacgatttcgacgagtgcatgatttatatcgccgagaattatgcgtggaacgccaattccgacggggccaaattcctgatggaactgctggaacgtaaattcgcatagctgcatggcaaagctttatatcgttcccaccccgatcggcaatctcgacgacattacgctgcgtgcggtcaatgtcctgcgcgacgtggatttcatactcgccgaggatacgcggacgacttcgttcctgctgaaacatctcggcatcgagaagaaactctattcccatcataaattcaacgaacacgccacggtgaagatggtcgccgagtcgatcgcggccggacgcaatgcggcgctggtgtcggatgcgggcacgcccggcatctccgatcccggttttctgctggtgcggacctgcgtcgaagcggggatcgaggtcgagaccctgcccggcgccacggcgctgattccggcgctggtgcagagcgggtttccgtgcgaccggttctgtttcgagggtttcctgccccagaagaagggccgggccaaacagttgcagtcgcttgccgcggaggagcgcacgatgatattctacgagtccccctaccgcgtggtgaagtgtctcgaacagtttgccgaggtgttcgggccggaacgcagggtttcggtgtcgcgcgagctgaccaagaaattcgaacagaccgttcgcggtacggtcgccgaggtgctggaacacttccgcacgacggaccccaagggggagttcgtgatcgtgctggccggaaaacccaaaccgaagcgggagacggcggcggacgaagaggaataaatgaaagatagtgcatattgaaatggaaaatacgaacgatacgcataatgtaaaacgctctttctcgctctgggtgggggagatgcgtgaattcctgcgggggcgcttcagcctcgacgaagacaaggcgcagcgcgacgaggtcgtggcggccatcagcaagggcgtggtgttccgcggggtgaacctttgggtgctgatttttgcgacgatgatcgcgtcgctcggcctgaacgtcaattcggcggccgtaattatcggcgccatgctcatttcgccgatcatgggtcctattatgggcatcggcctttcgctgggcatcaacgatttcgagctgctcaaaaaggcgctgcgcaactatgcgctgatgttcatcgtggcgattatcacctcgacggtttatttcctcgtgtcgcccctctcgtcgaacagcagcgagctgctggcccgcacggtgccgacgacctacgacgtgctgatcgccctgttcggcggtctggcaggtatcgtggcgcagacgcggcaggaccgcacctcgaccgttatccccggcgtggcgatcgccacggcgctgataccgcccctctgcacggcgggattcggtctggcaacggggcagataaaattcttcgtcggggccttttacctctttttcatcaactcggtcttcatcgcgctggcgacttacctcatggtccgtttcctgaagtacgagaagaacgcctttatcgacaaggtgcgcgaacgcaacgtcaagcggctgatgatggttattacgctcgtgactttcattccgagcgtcgtcatcggtttccatatggtccgcgtctcgctgttcgaagccgtggccgacaaatacgtcgcgcaggtcttcaagtttccgcatacgcgcgtgatcgagtgcaacaagcattatgcgcacggcaaagacccctcgcagatcgaactgctgctcgtgggagaacccatcggcgacgaaattatcgagaatgcccgtgcgcagatgcgcaacttcggactggagaaggccgaactggtggtgcgtcaggccaacaagacggacgagataaacgtggcgtcgctgcagcagagctacctcgaactgctggaggagaagaaccggcgcatcggcgaaatgacggctcagctgaaacgctaccgggttacgaacgtcgaagtggacgacatttcgcgcgaagtgggcgtcatgatggagaatatcaaggccatatcgctgatgaagggcattacgttcgatgtcgcgggtacgccgctcgatacgaccctcgtatgtgtcgttacgcccaaggcgcccgccgattcgatcgaccggacgacgctggccagctggctgaggatacgcaccaaggtggataacgtgaaactttttgtcgaaccctaacgccttgccggatgaaacgagctgagctgaattttgcgcagaaggtatggctggagtctttgtggctcggcgcccgtttctttgccgtgctgccgtactggttcaaatattacgtcgtcgagaacctgctctttttcatactctactactgcctgcgttaccgcatgaaggtcgtgaacgaaaacctgcgcaattcgttcccggaaaagagcgtcggggagctggccgtcatccgccgcaatttctaccggacgctggccgagatattcgtcgatacggtcaatatggcccatatgggcgaagaaaaggcccgcacggtactgacggtgaagggattcgacgaacattacaaggccgtgcacggccgcgactggatcgctatgacggcccatttcggctgttgggagtattgttcctactgggggctttacgaacgctcgcagatgttggtggcggtgtatcatcccctgcgcagcaaggtcatggagcggctttaccagcgtttgcgcaactatgaaaattcgatgaccgtggccatgaaggattcgctgcgcttctacctgcgcaaccgggaatgcggcgtggacggcaaaaacctcgtcatggggcttatcgccgaccagaatccgccgcgccgtcccgacagccactggttccgcttcctcaatcaggatacgattttttttgacggcggggagaagctggcgctgcgctgcaaactgccggtctatttcgtcaggatggaccgtctgcggcggggccgctaccagatgtcgttcgagccgatttacgacggtgaagagcaggtcgccgaatacgaaattacggaacgttacgttaggaagctggaagcgatgatcagcgaacacccggaactctggatgtggtcgcaccgccgctggaaacacaaacgtacaaatgccggtcgctaaaatagtcatactcaactggaacggcgcggagcacctgcgccgtttcctgcccagtgtcgtcgctgcggccccagccggcgtggaggtcatggtcgccgacaacggctcgacggacgattcgctgagggtgctggcgacggaatttccttccgtcggggtgttgcgtctcgaagccaattacgggtttgccggagggtataaccgggctttgaagcaggtcgaggcggactattatctgctgctcaattccgacatagagacgcccgaagggtggctcgctccgatcctcgacgtgctggaacgcgaacccgacgtagccgtcgtctctccgaaactgatctcatggaccgaccgcacggaattcgaatatgcaggcgcttcgggcggatttatcgactttctcggctatccgttctgccggggccgcatcctcagacaggtcgaggccgacgagggccagtacgacgacgcccgcgacgttttctgggtcagcggcgccgcattctgctgccgggccgatgttttccatgcgctgggcggctttgacgccgactttttcgcccacatggaggagatcgacctctgctggcgcatgcagttggccggttaccgggtacgggtcgtgccgcagagcagggtttaccacctcggcggcggtacgctcacgaccgattcgccgaccaaagtcttctacaaccaccgcaataatctggcgatgctctacaagtgctcttcgtccgtgcagcgggtcacggttgccgtcgtgcgtcctgcgctcgacttgctggcggccctgtcctatctggtgcaggggcggagcgacaatttccgggcggtgttccgcgcctaccgcgatttcctgcggtggcaccgcgatctgtcccgcaagcggaagaccatccggcagaaccgcaaagggtccgcggaagagaagatttaccggggctcggtggtgttgcgttatcttttaggcaggaggactttcgggcggatgatgtaaggcaaattcgcaaaatcggaaaagtccgtttccccggcggagaatacctttgtcgccgagatgaagaacaaaccagccacgacagccgattatcagcggcggatcaacatcgtcgtcgaatacatccggacccatctggacgaaacgctcgacctgcgtacgctggccgaggtgtcgtcgttttcgccctgccatttccaccgtatcgtttcggcctttctgggcgagccgccgggggagttcatcgcccgcacgcgcatcgagacggcggcgcgcctgctgctttactccgatcttacggtcgcagagatcgcctaccgcgtggggtacgacgccccgtcgtcgctgaccaaggctttcggacggtttttcggcatctcgccaaaagagtaccgaaccgctaaaaaccttccgtccatgacaacacgcatgcactccgacgccggaatccggttgtcgaaacccaaaatgctggaaattcccgaaaagaccgtggcctatctccgcgctcagggggattacggcgaagtcgattacggcgactgtttcgcccggctctggcaatacgtcaaagagcagaaactcttctcggcggggatcgagtccatcgtcgtttaccacaacgatcccgacatttcgaaatccggcgacctgcggtgcgacgtatgcctgacgattcccaaaggcccggtggccgtcggccccgtgggcgtcaagacgatcgccgcaggccgctatgcgatgttcgtccatacgggtccttatgccggattgggcggcgcctatcacaaaatctttcgggagtggctgccccgaagcggctgcgaactgtgtgacagccccggtttcgaacgctaccgcaataatcccgaccgggtgccggcggaaaagctgaaaacggagatttatattccgctgaaatagaagccggtccggactgaaaaccggtccggatgcatgaaccgaccgcctgacaggggcggttggtccgtcgtacgaaaaagcggcccgctcagcgggccgcttttcgcggggagcgtgtccccgttcggtatcgcaactcgattttcagccgatctttacttgttgatcttcgcccatgaatccttgagcgtcaccgtgcggttgaacacgaggtgttcgggcgtcgagtcggtgtcggggcagaagtagcccacgcgctcgaactgaacggcctgaccgaccggaacgtcgcgcagcgacggttcgagatagcctttgattcggaccatcgattcggggttgagattgtcctcccaagtctgcccctcctcgacgtcgtcggggttctccttggtgaagagcgggttgaacaggcggatttcggcttcgacggcgtctttggccgacacccagtggatgacgccttttacgcggcggccgtcgctcgacgagccttggcccgacatcgggtcgtaggtgcagcgcagttcggtgacgttgccttcggcatccttgatcacctcctcgcatttgatgaggtacgagtagcgcagacgcacttcgccgcccggcgaaaggcggaagaacttcttgggaggctcctccatgaaatcgtcgcgttcgatgtagatcaccttcgagaagggaacctgacgtgttccggccgtttcgtcctcaggattgttgatcgccgtgaagagttccgtcttgttctcgtcgtagttggtgatgaccactttcagcgggttgagtacggccatgcgacgctgggcgaccttgttcaggtcttcgcggacgcagtattccagcttgccgaggtcgatgacgttgtcgcgtttggcgacgcccaccatttcagcgaagttgcgcaccgaagccggggtgtaacccttgcggcgcagggcgcagatggtcggcatgcgggggtcgtcccagcccatcacggcgccttcctgcactaatttgagcagtttgcgcttcgacatcatcgtataggtgaggttcagacgtgcgaattcgtactgatgcgaggggaagatctccagcgcttggatgaaccagtcgtagagcggacggtgtacgtcgaattcgagcgtgcagatcgagtgggtgatctgctcgatcgagtcgctctggccgtgggcgtagtcgtacatcgggtagatgcaccacttgtcgcccgtgcggtgatgctcggcgtggatgatgcggtacatgatcgggtcgcggaacagcatgttggggtgggccatgtcgatcttggcgcgcaggaccttttcgccgtcggcgaattcgcctttcttcatgcgctcgaacaggtcgaggttctcctcgacggagcggtcgcgccacggtgacggcgtacccggaacggataccgtgccgcggttttcgcggatctgctcctgcgtctggtcgtccacgtaggccagccccttcttgataaggaccacggcccagtcgtagagctggtcgaaatagtccgacgcatagcgctctacggcccagtcgaagccgagccagtggatgtcgcgcttgatcgaatcgacgtattcgacgtcctccttgacggggttcgtgtcgtcgaagcgcaggttgcacttgccgccgtatttcttcgccagtccgaagttgatgcagatgctcttggcgtgtccgatatgcaggtagccgttcggttcgggtgggaaacgggtctgtacgcgcgtttcgcccttggcgatcgactcttcgatgatctcttcgaggaagttcagcgacttctcccgtgtttcgtttgtttcgcttgccatatgtttcgcttgttgtatttttattttttagccttggggccgatgttgaacagcttctggatgtctaccgagagcttgaccatctgttgcgtgcccatgcctgagccgtcgtaatggaagaccatgcccgcctcgacgcccatcgttcccttgaagaaccggcggtcgtaaccgatccacgtgcggttgtagatatggtcggtggtcgagtagaactgttcgccggcatagagcggttcgccgacataggcgtaccggaacggctggaggttttcacccagatagaggttgttttcgagtttcacgccccatttggtcatgacgaagtcgatctgggcgcccttctgctttttccatcccgactcgatgctgcgcgcccgctggggtgcgaacagaaagcccgccttgatgtcgaagtcgaagtaggcgttgaactcccagcccgcatagggattgaccagcaggttgtccgtcacgttctcgttgccgatctttccggcgaaatggaacatcgagaaggcgtagccgaagtagaaccccttgtcgagcgtgtagcggcccgccgagatgatgcggaacatttcgcgcgactcctcggagtacatgccctcccagtcgatggccatttcaacataggtgttcctgcgttccgtggatttgtagtgtcccagaaaacccgaaaggcggttgtggtagaacgccgtcgaatccccgaagaacgccagcgagtagtcgcccagcagctctttgcggtcgaagatgccggcgttggcctgcacgttcctgctgttgaactgatagtaggccgaggggcgcgccttgctcaggaatttggtgtcgtcgccgaagttctgcaagaggtccacgccgacgatcagccggtttttgtccatccattccacgccgatccggggtgtgagccgggcgctgaagagcgtctgcgattcgttgaaatcgttgttggcgtactcccggttgtcgaaacgggtcgtaaagtcggcgccgacgatcagcttctgcgcttggagacctccccccgtaatgaagagagcgagcgcgaatgtcaagacttttttcagagacatagtgttgtgttgattaggaccccaaaaataggtaaaatattttttatttgactacttttgaccccgaaatcacttatttgaacacgttatgcgaaaaatcaccaacgaggagctggggcgtcccacggccggagagttcgccgcgatggagaaaatgcccgttacggtcgtgctcgacaacgtccgttcgctgcagaacgtgggggcgttcttccgtacgggggacgctttcgccgtggagcatatcgccctgtgcgggattacggccgtgccgcccaaccgcgacattcataaaacggcgctgggcgcggagctgaccgtgccgtggagctattacgagaccaccgaagcgtgtatcgaccgcctgcacgccgacggctacgaggtgctggccgtcgagcaggtcgagggcgccgtgatgctcgatgtcttccgcgccgcgcccggcgtgaagtatgcgctggtcttcggcaacgaagtgatgggcgtggggcagtcggccgtggaccggtgcgacggcgcgatcgaaatcccgcaggccgggaccaagcattcgatcaacgtcgcagtttcgggcggcgtcgttttgtggagttttttccgccggatcgggccgggacgctgaccgggccgggagaatggccggcggacggccgggttcaaataaatttggcattgcgcccggcttgcgctatatttgccccgatttacaggagataacagtaagtcttcctttgcaaagggaggtccgggaggtattgtcgatatggaataggcgtttttgcgccgtaatacgaatccgatggattccatgtcggaaccttgcgaacgagtgaaatgttaaatgctccatcgggttcgcagtgaactatgtctgtagaaagtactgtcagggccgttacgacctaccggctgacggagatgaaacagcgcggcgaaaagatcgccatgctgacctcgtacgactattcgatggcgaagatcgtcgatgccgcgggtatcgacgtgattcttgtcggcgattcggcggccaatgtgatggccggttatgaaacgacgcttcccatcaccctcgatatgatgatctatcacgcctgctcggtcgtgcgcgccgtcaatcgcgcgctggtggtcgtcgatctgccgttcggcacttatcagggcaattcgaaggtggcgctcgattcggccgtccgcatcatgaaggagaccgaagccgacgccgtgaagatcgagggcggcgaggagattctcgaatcggtcaaccgcatcctctcggccggtattccggtgatggggcacctcggacttacgccgcagtcgatccacaagttcggcacttacaatgtgcgtgcgaaagaggaggccgaggccgagaagctggtgcgcgacgcccacctgctgagcgaagcgggctgtttcggcatcgtgctcgaaaagattcccgccgcgctggccgcccgcgtgacgggtgaaattcccaccccgacgatcggcatcggcgccggcggtgcctgcgacggtcaggtgctggtaattcacgacatgctgggcatcaacaagggattttcgccccgtttcctgcgccgctacgccgacctgcacgagttgatgacgggggctgtacagcaatatatcaaggatgtgaaggagtgcgacttccccagcgagaaggagcagtattaggagatattttaaagtgaattgcggggcgcggaacggcgccccgtttttttgcagcggcggatcgccgggctgttgcccgcagtccgaccgcaaaggcggtggcgatgcctgcggtccgtatcgcgttgagatacggcaggctgttgcgtttatcataaattgttgataaaaaaatcgaagggaaggcccggaatttaggccgtttcaaaaaaaaatgattacttttgcatgcaacaaaaatccacgttcattatgtcttttatcaatgaaagggttcagcccgaaggacttaccttcgacgatgtgctgctcgtacccgcctattcggaagtgttgccgcgagaggtcaatattcagacccgtttctcgcgaaatatcaaactcaacatccccattgtgtccgccgccatggacaccgttacggaagcgccgctggctatcgcgctggcccgtgaaggcggaatcggcgtgattcacaagaatatgtcgatcgccgagcaggctgcgcaggtccgccgggtgaaacgcgccgagaacggcatgatctacgatccggtgaccatctccaaggagaataccgtcggcgacgccctgaacctgatgcgtgagaacaagatcggcggcatcccggtcgtggacggcaataacatcctgatcggcatcgtcaccaaccgcgacctgcggttccagcgcgacatgatgcgccgcatcgaagaggtgatgactccgggcgaccggctgattacgacccatagcaccgaattgtcgcatgcgtcggaggtgctgctcaacagcaagatcgaaaagctccccgtggtggacgacaagggccatctggtggggcttattacttataaggacattaccaaggtgcaagaccatcccaatgcctgcaaggacgccaagggccgcctgcgcgtggccgccggcgtgggcattacgcccgatgcgctggagcgtgtcaaggcgctggtcgccgaagacgtcgatgccgtggtgctcgactccgcgcacgggcattcgatcgccatggtgcgcaagctgtgggagatcaaggaggtttatccttcgctggaggtgatcgcaggcaacgtggctacggccgaagccgcccggttcctgatcgaaaacggggccgacggtgtgaaggtcggcatcgggccgggctcgatctgcacgacgcgcatcatcgcgggcgtgggcgttccccagctttccgcgatcttcgacgcggcttcggcggcggccggaaccggcgtgcccgtcatcgccgacggcggtctgcgctattcgggcgatctggtgaaggcactggctgcgggcggcgactgcgtgatgatcggctctatgttcgccggcacggaggaggctccgggcgaaacgatcatctacaacggccgtaaattcaaatcctaccgcggcatggggtcgatcgacgccatgaaggccggatcggccgaccgttatttccagaaagggtgcgaaaacaacttcagcaaactcgttcccgaaggcattgcggcccgtgtgccgttcaagggaacgctgagcgagacggtctatcagttggtcggcggcgttcgcgccggcatgttctactgcggtgcgaaggacatagagaccctgcagcgcgcgcgcttcgtccgcatcacctcttcgggtatgcacgagagccatccgcacgatgtggccattaccagcgaagcgcccaactacagcagcgaacgttagttatgaatcccgaaatcgcggcctgcgggcttttttgcgggaactgccgcaaattcggcaaaggaagctgtccggggtgccgcccgaacgaaaaggcgtcgtggtgcaaggtgcgggcatgctgcatcgaacacggctggcagagctgcgccgaatgtacgctgatgccgcctcagacctgcaaaaagttcgacaactttatcgccaaggtctttcaggtcgttttccgttccgaccgccggggatgcgtcgaacgtatccgcgaagtggggcaggaggctttcgctgcggaaatgcgcctttcgggaagctacaaccgtccggtaaagaaatagtaattaaaggattcgaagtcttccttgacaaagggagatcaagagggattttaagcatgaaaccggcgtctgagacgccgtaacgtgagtccgacgagtttcatggcttgtaaaccttccgaaattgatgaacccagattcgtcggacttacgttatattatggaaaaaatcctgattctcgacttcggttcgcagtacacgcagctcatcgcgcggcgtgtgcgcgagttgagcgtctattgcgaaatccaccccttcaacaagattccggcgctcgacgcttcggtgcggggtgtgattctgtcgggcagccccttctccgtacgggacgagaacgctccgacatccgatctttcggccattaagggcaaactgcccctgctgggcgtctgctacggcgcgcagttcctcgcatcggccttcggcggcgaggtgcagcccgcccccagccgcgaatatggccgcgccatgctcacggtgggcgatgctgacgacgcgctgatgcgcggcctgcccaaaaccacgcaggtatggatgtcgcacggcgatacgatcacgtcggttccggcgaactataagatcgtcgccagcacggaagacgtgcgcgtcgcggcgttccatgtcgagggcgagcagacgtggggcatccagttccaccccgaagtgtaccattcgaccgacggcatgcagctgctgaaaaacttcgtcgcaggtatctgcggctgcaagcaggagtggacatcggagagtttcgtggaagccaccgtgcgcgaactgcgcgaaaagctgggcgacgacaaggtcgtgctcggactttcgggcggcgtcgattcctcggtggcggccgtgctgctgcacaaggccatcggcaagaacctctattgtattttcgtggattcgggcctgctgcgcaagaacgagttcgaggacgtgctcgaatcctacaagaacatgggcctgaacgtcaagggcgtcaaggccggcgcgaagttcctcggcgatctggcgggcgtcagcgatcccgaaaccaaacgcaagatcatcggccgcgatttcgtcgaagtgttcaacgaagaggctgtccagatcaaggaggtgcgctggctggcgcaggggacgatctatcccgacgtgatcgaatcggtgtcggtgaacggtccctcggctacgatcaagtcgcaccacaacgtcggcggcctgcctgagaagatgaacctgcggatcgtcgagccgctgcgcctgctcttcaaggacgaagtgcgccgcgtgggacgttcgctcggtatttccgagcagctgatcggccgtcatcccttccccggacccggtcttgcgatccggattttgggcgatattacgcccgaaaaggtcgaaatcctgcagaacgtggacaggatttatatcgaagccatgcgcgatgcgggtctttacgacaaggtgtggcaggcgggcgcgattctgctgcccgtgaagagcgtgggcgtcatgggcgacgagcgcacctacgaaagctgcgtcgcgctgcgcgccgtgacttcgacggacggcatgaccgccgactgggtgcacctgccctacgagtttctcgccaatgtgtcgaacgacatcatcaacaaggtcaagggggtgaaccgcgtagtctacgacatctcctcgaaaccgcccgcaacgatcgagtgggagtaggggcctgtgaagggtgaataccctgatcggaggtgaaatgccctgacgataaagccgcccggttctcgaatgaaccgggcggcttgtctgttgggccgtgtttgggccgtttttcggtctgtctataggttccggttattcggaattgctatgcggcctgctttttctttctgttgaggagcgggaggaggaacgaaatcacggatgccgcgatccagaagatcgccgcctgcgagaagtcgtatatcttctcgccgttctccgccaccgtaatgtttgcgtctatgagccatccgctcgccacgtcctgcagtcccgccgcgatgtagctggccacgcctaccactcccagcgcggcacccgtcgccttccgcggcacgatgtctacggccatcagcccgccgaggaaacagatcagcacgccgatcgcaatgccgaacagcaccatgctgaggacgttcacccataatgcgtcgccgccgtatatgaacagaatcagcgccacggaattcagtacgccgaatatcagggcgggcatatgccggtcccccttgaacagcttgtcggaaaaccatccggacaatacggttccgatgattcccagcagggcgtttatcgatacgatggatatggcttgtgcatcggagaagcctttcgcctcctgcaggaacaacacgccccacccgttgatggcatagcgggatatgtacatgaatgcgctcgcggccgcgagaatccacaccgcaggcgtccgcaatacctgcttctgaatctcttttacggataactcctgcccggttgccggctcttcgtgcgccagcgtctccacgggcggcagtcccttcgattcgggcgtgtcgtggagcatcagcagcacgatgacggctccgatggcgcctgcaatcgcagacccgaagaatccggcctgccagccggctatcgaaacgatgctccccacgaagatgaaggagaagaactcgccgaggttgtggcttgccgagaaaaatccgtaataggttccccgctccttgagcggataccagcgcgagagggagatgattgcgggcggcgcacccatggactgcgcccaaccgttcagaccccacatcacggcgaatgaaatgaagatgacggctgtcggaatcaccgagtgtgcgacgccgagcgctcccatgagcatgttcgccacggccgatacgatcagtcctgtggccatgaaacgcttgatgttgcagtagtctgcgatgaatccgttcacgaacttcccgacggcgtatgcgaacaggagggccgagctgatcaccccgatctgcgtggcgtcgagcgtgccgctgtcgaggataggctttttcatgacgttgagcgacgtcctgcacacgtaatagagactgtatccgagcgttgcggcgatgaatgcctgcagccggagccgtttgtatagtttctgctcttgtgcgggatcgagctgccggcggggaaccggtgaagagatgcggtaaaaacgggtaaggaaattcattggctgaagtcggtagttttggtttatctgtttaagcgggtgcatgcggcagcaccgcactattgacagaacacttcagacgtgcccgatacgtaacgggagagcggatttttccctataaaacggcagcgccgccggagtcctcactccggcggcgctgctttcgccctgcggcggggcggttagcgtatgccgtatttgccgagtatcttgcggatctgcggctcgatacggtcgagcatgtaggtaaatccgagatcggtcggatgcgttccgtcggccgtggcgatatggtcgctgcccagcagatcgcccggatcgacgaaatagatgtttttgtcggtcttcatgcggtcgcggacctgcgcttcggcggcggcctgcttctcgcgttcgaatttctcgatccgggtgctgaagttgcgggtttcgcgccggatggtttgcaggaaaatcagcggcgtggtgggatgcgtgcggcggatggtatcgacgaaagcgtcgaaacgttcgttgatgacctcggcgctgggattcgagaaacagtcgaagacgaaggcgtcggcttcgacgcgggacagatacgatgcgaattcgggctgcatggtgcactgtccgctgaaacccagattgatgcagtaaagtcccgtgtcgcgtccgagacgagacgaataggccatgcctgcgcgtccggccgcgattccgtgcgtaatgctcgaaccgtggacgacgatcttgtggcggaacggattttccatcggggtgatgacgctcttttcatcgacgccgatttcgagcttcttcagctggtcgtaaagcggcagatagagcaggcactccttttcgccctccgccatattgctgattattgcggcgtcgtggcggtcgttcttgccgttgatcttcggtctgccgactccggcgaagacccactctccgttgttgcggatgtagaggtccagccctttttgtgcgacggcggccatgttgtcgctcggatttttgcccgacgtctcccagcgggcgcggatcgtgcggctgtcggtgcggaacacgacggccagtcccgtcgggtggtagcagtagccgggggtctttgcgggcacccggaagcgggtggtgtcgatgcggttgtagggctgttcggtgggaagcgccttgccgatgacggtcagcgtcgcggcgtccacgtagcggacggggtctgcggagcgggctgccgatgcggaaagcaggccaccgagcagcagaagcaggggtaggtgtttcataataggtagtgttgttttggtattcaggaatacaaagatagtataattataatcggatataatcggacgatattcggccagctaaaatttttccagaccaagcccgccgcgacggtatggttgcgggcgttctgattgtcaggcgggcgatatgccggcggttcccggcgctggccgccggagcgttgtaacatatttgaaacgttcctctcttcgtattgtcatcggggcgtcgcaacggcgaaacagggggagcgtagttttgcggtgtcgaaagaaaaccgctctccggattcccgccgacggcgaatctattgaccgatcctgaaaacttcacccctcccgttcgcaatgaacgggatttttttgcgtttgcagggtgcggccgccgcggaaaatgcctatatttgcggcggcgacaagtcccggaaagcgatatgaaagattttgcagcgatagatttcgaaacggccaacggcaagcgcacgagcgtctgctcggtgggcgtggtggtcgtacgcggcggcgaggtgaccgattcgttttacagcctgatccgcccgcgacccaatttttacagccgcttcaccacggccatccacggcctgacctatgacgatacggccgaagcgcccgatttcgaaacggtgtggaaacagatcgccccgcgcattgagggcctgccgctcgtggcccacaattcgcccttcgacgaagggtgcctgcgcgccgtcttcgaactttacggcatgccttatcccggctatcggttctactgtacctgccgggcttcgcggcggacgttcggcacgcagctgcccaatcatcagctgcacaccgtctcggccgcctgcggtttcgacttggcgaaccatcaccacgctctggccgatgccgaagcctgcgcccggatcgcgctcaaaatcctgtaaaagcatacggttctattgaaatgcaccccaaagttatctcgctttggggtgcattccatttgaaagtgggtatttcgtatcagagtcccagttccagctggaaccggatctcccagcggttgtaattggggtcgatcgactcgctgcggtggttgtaggacatgtcggcctgcactttcaggctgtgtccgatgatgtagcgggtaacgccgaaagtcgtctggttccagcgtttgtaaccggcgaaaggctgcacctcgctttcggggaagagcgtcgagttgcgcagggcgatctcccatttcttgtcgaagaggtagctggtctgcacgttgagaccctgaccgttgtacacgaaggcgttgctccggggatcgaacagcggttcgtcgcagctgcggcccatgaagtcggtatagaatgcgaatccccggtatttgaggatgaagtcggcgaagtaggaacccagattgcgggtcgcgtcgtcgggcatgacggcgccgcgctggcccttcaggcgcgacgccttgtggttgtaggaataggctcccgccagcagtatcttgacccgttcttcgccttcgaagtcgccttcgagcacgtcgcctttcgatttgaaccgtcccagcggatagagttccagacgtcccgtgtaggccactcctccgatcgccgaactgccccagttgcggccttcgcccagcgttacggagcctttggccgagaggttgaacccctcgccctgacgcatgttgtattcgccgaagaatccgaagccgcggtcgagattgaattcgctgttgacgatgctccggtcgatgaactgcagggcgctcgacgagttggtgcgcgcccggttggccttgatcttggtctggccgaatccgatgttccatttggggctgggcacatagtagacgatggcgtcgcggacgatgttcatgttgccgttgggcagcggttcggtatcgtacgaggtgaagcccagttgtatggagtaaaccagtttcggggagtagatgtgtccgtcgaaacgcagccgcaggcgttttacttgcgcgtcggttttggcgagcgtaaaatccttgtcgaacgacagtcccaccatgttctgcatgcggaagcgcatggtcagcgagaaccagttgcttttggggcggaacgtgatgcccttgcccacttcgaggttgggcatgttgcgcaggcgttcccgcagttcggcgtcgttgtcgagcgaatcggcggtaatgacttcggtgcgcctgagcggcgagcgctcctgtgccgcggcgatcgagcagcaactggtcagcaggagcaggaggagtgtttttttcatttcggtcttgtctgttttttccgttcgtccggttccccgcaaaaatacaaaaaatatgcgcgtcccggttaatttgctgcaaagttggaaagtaaacctgaaaagaatatgaaacagactttggaatcctgccggaaaggaattaaatttgctggagcggacgggaggatcggactgattcggaggactcccggccgcccggccgaaaaacaataaaccccggccggggacgtttaataatataaccgttaaagtaaactgtcatgtcagagacaaaattcaaaggttcgcccgtgcgtgtcgccggcgaattcataacggcgggcgccgaagctcccgctttcgaactggttaagagcgatctctcgcccctgcgtctgagcgacctcaaaggcaagcgcgtcgtgctgaacatcttcccaagtctcgatacgagcgtatgcgcgacttcggtgcgcaaattcaacaagctggccgcttcgctgcccgataccgtcgttgtggccgtgtcgaaggacctgcctttcgcgcatgcccgtttctgcacgaccgagggcatcgagaatgtcgtgcccgcatcggatttccgggcatcgggattcgacggggcttatggcgtgctgatggccgacggaccgctggccggcctgctggcgcgtgccgtcgtggtgatcgacaaggcgggcagggtggtgtacaccgagctggtgccggagattaccgaggagcctgactacgacaaggccgtcgaagccgtgaaagctaactaacagacctaaatagatacgatcatgataagactgaatgtttttatccgcacgaccgaatccaaccgtgcggaaatactctccgtggcaaaagaactggtgaccgcttcgctcaaggacgaaggctgcattgcgtacgatattttcgagagtgcgacgcgtccggacgtgctgatgatctgcgagacgtggagcgacgccaaggcgctggctgcacacgaacaggcgtcgcatttcacgacgctggtgccgcgtctgcatcagttgggcgaaatgaaactggagaagtttgttttctaaactccggcaacggtagacataccctccgcatcaagatgcggagggtatgttgtttttgcagcaggtgtgttttgtccggggaaatggacaggatgcgggggagggcttgtgcggacccgccccctatggcacttcctgttttgtctgctggatttgcttctcgttttgcagattatcaacgcgaaggcgaatccggtgcgatggaaaaatgaaattttgactgcatttctttgtatttcgtcaaaaagattctatatttgcacacccgtttcaggataaaggcccggaacggcgaccggagagttgggtgagtggctgaaaccaccagtttgctaatcgcaaaaagaggccaaacggcaaaaaatacgcaaatcattcatttgcactgatttttaactaattaacagcgttcgaattatgttcggacgctgtttttttgttgcataatcagcagttgaaaggtacatttgctgtaagaagttttctaatagttttataaaaatttcttgccttatgccgacttttaaaaccgttattcatcccccgtacaaaagagcagacgggacgttcagagtgaaaattcgaatcactcacaataaacaatcgcggtatctgccgaccccctactacgccagcgcagcagaagtaaacgacaaattcgatttcaaacggggaacctcgtatgttgatgatacccgtcctataattgataagtatagaaaggtctgcaacaaatacgccgataagatcgacacgatggatgtcgggcaaatcgtcgaattaatccagaatttcaaagacgaggaaaatttcaaattggatttctttgcttatggccaattacacatagagcggctcaaggcaacggggcgcatacaaaacgccactatgtacggaacggcgttaagtgcgctccggcgcttcattggccgggataatttagacattcgggaaatcacgtctaaattcgtcggcagatttatagattttcttattcaagaaccaccgcgccccggccataagaaaggccgtcgggcaccctctctatatttttcgacgttacaagccctgcataatgcagctaaaagggaatataacgatgaagatttggggattatccgcattcaactctcgccgttctcaaaggtgaaaaagccacccatcccgacaacagacaaacagcctttgagtttagcacaattcagaaaactacttaccatcccagatgatacgtcatttgtacgcaaaggagattgcaatttacaggatttaggccgggatgtaggcatcctaacgttcctgctcatcggaataaataccgtagacttatacgaagcaaagggaatacaaaacggacgccttatatacaataggaaaaagaccaaaaatcgccgaacagacaacgcacgggtcaatatccgtattgagccagaggtaatgccgctgatcgaaaaataccgtgatccgaccggggttcgccttttcaactttcataggctatacaagagtgtaaataactttaaccgatcagcgaacatagggcttaaacggatcggaaagatcatcggatttaaggatttagaaacctacactttccgtcgaacatgggcatcctttgcatggaactactgcggtatccgggatgatattatagatttcgcgctcgggcactctccgcgcagcgcatcaaaactggctcacatatacattaccgaggattgggatgtcgtcgatcaagccaacaggcttgtaatcgactgcattttcagcaatcgagtgaatacaatcattaaaaacacaattcagacccagcagattaccctaattgccccgaacaatccatccagcacattggggcaacgacttatagcgtcccgataaacctctttgttaaaattcattttttcgcctgttgccctaaaaagcagcaggcgcattttatttgattgtcagtcttttagatatgtcgagacctttttaaattgcttgtatgctatcttttcattttgtaccttatagtcaccgcaaaaatgtgatttttacatatttcacacaacctaaaacaaatatacaaaatggactacgagcacatcaaacagggcgaattacctcgaacatggagtgatattttagggggatttggctgcggggagattaaaagattccctttagagggacaagcattaaccaatgcccggcacgctataccgcgcatgggccgtaaggggttgaaattccgcacacgttcaaaaggcgatcatttctacatcctttgcaccgcccaccagcaggatggagctcgtctttctcgcaaagaaattcaacaactgttccggagcctcgaactcggagaataacccccatgcccttatgcaaactcaatggcatatcaagattgactgtgactggcagacaatcacacacgaaatcaccccgcgcgttcgggtgattgtcgatctgtcacacgcaattcgaacaatagcgaaagacggacaagccatcgacacttgccaatttgggcccgacatcctgcgacactatcaatggctactccgaatagctgaagatgccgaacaggtgaacacacaaaactatggatgatctattcgaacagaagaacctgataatggaaagcgccgcgctgggtgcctctatcgccctcaaccgtttggggctgattaaggacgaaatttcacagcgtgaagcgttccgtgtctacggagagagcctcgtgcgaacgtggttaaatcgcggctggataacccgtataaaaccgggtgccgggaatacgaaagtaacctattcccgaatcgaactcgacaccgtaaagcaactttacaacaaaggaaaattgcgctaataacatggcaggcagaaacgtaaaacggggtttagtgtatttccggatggactgcgacatcttccaagaccggaaattaaaacggctgatgcgtcgatggcaaaacgacgggctggctgtctacctcgccctgctatgtgaaatctaccgggacaaagggtactatgttactgcggacgacgatctgatcgccgacatcgccgacacctgcctgctcgacgatgagcgcacgacacttatatacaacgactgcatagacctcggcctatttgaccgcgaaatactcaagcaacaaggcttactgacatccaaaggcatacaggcccgctacctcgacattatgaccgttttgcggcgtaaaggcggtatagatgcagcattatccctcatttcttcggaagaaataaccgaagatgcggaaagaatacccgaaaattcggaaagacgggcgaaaactgacgaaactatccgaagaaatgcacagcaaacccaatttccaccgaacaatgcggaagctgtaccggaaaattccgaagaaacggctattaactccgacaatagagaaagagaagataataaagcagatgataattcagaaacaaacctacatacacatagtgaaaaatggaaaggggttaaaggggaaaaccaaatcgaaaacgaccgggcggcccttgccatgttcaaccgcagttggaacgaactcgccaagcacgaacgaatgtatatctgggttcgtcgccactatccgatcatgttggaatttgaacggcctttgaccctcgacaactgccgcagcatcacggacagaataaccgactggcacgatgtcgagcggcttatggagagcatagcgaatcgccggaacgtattaaccgcccacaccagcgcaatagccacattcaacagttttgcccggatggatgttgtattgcaacgaaagcagaagatatgacagaactgtacgacacaatatgccgaattgttgaagaaaaacgagcggcacgccgccatccgacaatagccctgtcgttggaaatatcccagcgtacaggatggcccgtgttcatcatagagtgggaaatgcgcgagttggagcgagccgggatagtttatgtcggcagaaccgcaggcccggactatgccactccccggtgcgctatatcgaaacaaataaaggcgtcacgcccttacataaatcattaactaaaaaacaacccaagccaatgacaaaaaaagagttagtagacctaatcgcggacaagcgagatttgagcgcccagatggtgcttacggtcgtagaagattttatgaaaatcattcaaagtagcgtggccgatggccagcgcatttttctgcgtggcttcggtgtttttcagccgaaagagcgaaaagccaaagtaggccgaaacatcacacgaggggaacaactctctattcctccgaaacgtgtaccccaattccgcccttacccccactttaaaaaagtcgtggaaaagggtaagtaaaaactccagccctgtcctcgtggcagggctcctttaagaaacgaaatgagtgcactcgaacataagatcgcatattccatcgcacttctccgacgtggtgaggcgttggccttacgcatgtccccagacggctatcatttagcattctccggcgggaaagatagtatggtattataccacctcgcaaagatggccggggtcaaattcaaagcccacatgcaggtaacaactattgacccgccggagctcatgcagtttgttcgggccaactatcccgacgtggtgttacaccgcccgacgatcaacttttacgatctgatcgtaaagaaacagatgctccctttacagcatgttcggtactgttgtgcttatctaaaagaacaggcaggagcaggaaccgtcacacttttgggcatccgagcagcagaaagtacccgccgggcagcacgcaacgagttagaggtatctggtcataaattcagcgggagcctcgaccaattcaaccgacgatctgatcgcagcttcgcgtgtgtgaacggcaaagacaaaattatgctttcgccgattttccgctggtcggatgctgatgtctggaatttaattcgtggacaaggcttaccatactgccgactttatgacgagggctatcatcgtataggctgcatattctgtccaatggcatcaacaaaaattaaagccaaagatcgcatgcgttatcccggagttgaaaaagcaattaaacgcagtatccaacatctaatcgacaataatggctatatgaataattatcaagcaacagcagatgagatttttaattggtgggtatcgaacacgtccgcaaaggagtttttcggaatgttgaggtttcagagaacaatagactttaacgatatatgaaacgtattatccgcgtgttcccagcccgaacccatgctacaccagacgacgatctggtgcgcatcaacgcaataccgtctctctttgacgaggccgacgaggtgcacatctcggtcgcctttacatggcacctcaaatgggcggaatgggcagcgaaacaatgggcttgcgttgcgccggtgaaagtcggcggcccagccctcaacgagccgggcggggactttataccgggcatgtacctaaagaaaggctacgttatcacctcgcgcggctgcccaaaccgttgctggttctgcgctgttcccaaacgtgagggcggccagcttcgggaactacctgttacggacggctggattgtctcggatgataatttactggcctgctctccccgacacattgacgaggtattctccatgttggccagacaaccacatcggcctatattcacgggcggattagaagccgcccttatgacctctcaaatggccgcgcagctataccaactacacccccaaaggctatttttcgcctacgacacaccgaacgatctggaaccgttgcaagaagcaggtaagatgctgaccgatgcaggattttcgaaatccaatcacgcgctgcgctgctacatactgatcggctacaaaggtgacacaatggagaaagcccataaacggatgggcgaagcatggcgggcagggtttatgccctttgccatgctatatagagataatagcggtcagttcgaccctgcgtggaaatggtttcaagggcaatgggccaatccaagaataacctattgcaactgtaaacgagatttcggagattaacgcaccccgtgaaaacgaaaaaatatgagcggtaacaaagataaactgatcgcatttaattatttcggaggaaaattcgtctggttagaatacctctacgacaattttccgccccactttacgcacctgatcgaccttttcgccggctccctttgtgtatcgctgaactatcggggccgggttatacggacagccaatgagatcaacggggaaataaccaactttttcgagatactgcgcgaccatgaagaagaacttatccgacgattatcactcacgccccactcggaactggaatatttgaatagctggggcaatacaaattcgggtaagatcgagcaggcgcgacgcttctatgtccgggcccggcaatcgttctacggattaggggcccaagcacaatcgaaaggctggcatatgaccaagcagcacgtaaacgctcaaggcggagaaacgattagccggtggaataacggaattggaaagttgcatacagtagccgccgagatccgcaaaaatttccagatcaccaataccagctacgacgactgtatcgaccggctcgactttccgggcgcgttcttctattgcgacccgccctatccgttggcatcccgaaactcccagaacgactaccatttcgatttcacggacgacgatcaccgggcgctggcggcgcggctccactcgattaaaggttacgcaatggtgagcagttatgattgcccgctgatgcaggagttatacggcgattggtacatggtgcggttccccagaaaacgaaacaacctacgttctaccgttgtaaacggcagcgggacgctcgtacaggagtgcgtttggtgtaattatacgccccctgtcgtaacacaaaaattattctaaccacaaaaaaatcaaagctatgaatgaaacacttgtttttctggtttcgggcgtgatcgccgcccttatttcggctatggtctgtctgctgttccgcctctgggacagtcagcgggccaaatgcaatgccgtacaacgtcctactgccgacaccctcgcccggggcggttcccgtggaaaatgaaaacatgggttagcttccggatcgaacggacaaaaatcgggataatcaactacaacaaaaagacaacggctggcaaaacgccagccgttgtcttacattaatctattgcatgttcgagagcgtattcgtaatcctcttttgtgaacacaaagactgccaatgataagccatcggaaacctcagaacattgatatccatattcaataaaaatgcttctattatccggtagttgatttgcatagattcggataatatcatcaaattctaatatacaaagttcctttgcctgaaacgggaaaaatccgggtctgtgttttgaatttccccatgaaaagctttcttcattctccaatatcagcggattcggaaaattaccatattcatctattaactggattgttaatttatgtccgctttgatttttaaactcatactcaaatacaggtggttcgtttcggctgctattgtcagaacagcccaaacagaatattactaaaaaataaaatagacataatttactcactggcatatagacggcttttaatgtttcaaagttataaataaaattcaaataaatcgtccaatgatttatctgttattccatattgtcctttgtattctttcaatgcttctttgagttgggggatggtcttagatttatataatacctgctgcaacttatcaatatcgttcaagtaaatattatcattgacatatatcattgcatcggtatttggtctatacttttgataatacaccctttgatttgagccgtcataaatatcaataaaaattggtgtatattctctgccataatccgtatttatactgtatttcgaccaactttggaaattatactcatcaggcacttcaaaaagcatgtgatacattggcggctggaaaaatgtttcgtatttatgcacttcatgggcatatccacgtaaggtatattcattttccgttactgcccacccgatcaaattagaccaactttctcgtatcgtatctacatagcctttataagcatttcttccattgacacgatagaaaaaagcacaatggcccaattcatgaaatgcagtttcaagaataccgtatgtgggacgccaaccacctgcatcttctccatagataactatatccggttgaatacctctcaatgcttgggttttaaaatgtcctctttcatctccttttttatgtcgataacagattttaattttccgtaaagtcaaaatcttatcgaatagatagggcccaaagaaatgatgataaagtgcccttgttagcgttgcataacgcaaagatttaccccctccgatatttaaattccaatatccacgctgtttgggcccattgtaaaatgcttgcacaatgcttccatctctaatatcccaataattactttcccaacaaatagaataattagcaggccgttcaaaaccatcgccgcgacacagataatgtccatttctatccgtatatcctacacgagtggtaaaccaacgacgggctcgaacttttacaccaccaataggaacataatcctgcgctatatcatcccacgctttaatatatccttgtggataatatctacttgcacgagtttctggttccgtatcaatatttccagttaattcaagtgatttatctacaagagcctcaataaaattagaagaaaccataccgggacgtgtaataggttcgtcatcaagattttcgtctgggatatacaattcttcaagtatagaatatggaacattagacggcagtgtttttccatatggccacgaggcatataacgattcgacttgggtatcttcaagggcccccgcagtgtcaaatacgcccgtgcctatcagttcataatcaagaggataactataaaattcaatagtcgtatctgcttttaaaatatcaagttgttcctttgattctggcgaaaattcaatgtataaatgagtgggatgaatagatgattctggcacctcaatttctatattacctgttgctttaagagcccttacagcagctttcatattccttacagaataaggattttccagtttattcccaagttttacagtaggctcaacagattcattggctaacatcgcagagcgtgtcataatttcctgtttattggcggctttatcctgattaggaagcacattatcagtcaaatcctctgaacatgcataaaaaccaataatcattaggagaaataataattttttcatgatgggatagtgttattattttttaagggcaaccaacagtttatcacaacctcctttcctaaaaactgtttttatatgctatatacaatataaatattattattttaaccaaacatatataacaagactttaatagcatcttacatatatgtagtagtaataagacgaaatagaacataatataacataatgtaacactctaccggagccgtcccacaaaacgcgggtagaactcgacatcgacactggtggtcgaaatccgacaattagctgtcagatgcagtcgcagccggaaaaacttgtatgatagaggtgtcctgcgcaacctcgcatccatgccctgaacgttacaccatgcgtcacggagaacgctccatgtgttacagtcgttcgacccctcgacgataatatgggcgaagcaatcctgcgacataatgcgtgctacgacggtttcaagacgtttaaactccgttgtaccgagtttcagaggtcgtgttacggcccaacattcgaccggctcgatcatctgctcgtcggtaagtgtagcgagagcatgggccgtcacaacctcgtcattgttgagcactcgcccggccatgtcgcgtgtcgcccagacgcctgctgctatggaatatacataagcataagaataggcacggttaaagacgatcagatcgccgtatttgaattgaaaatagatacgggcttctgtaagatactcggccagttcgccggggtattgctccagttcgcgggagatcacctcggaagaacgtccccgcagggcatgaacgccccgtgaggtgatataatatactgtttcaagggccgcacaagtattcgggtttacgatctgatcgtgattcaccggcagaatgttcgaatagagcacctcgccggtgccgctttccagcgaccacacgccccggtcggtaaagacatacagcgggaacgcaccaaaccgggtggctgacagttcatccacgacggtcgcaatggcaaatatggtttcttcgttcagtccaacacgatacgagtttgcaaagggctgcgaaaacaaattgttcaacgccgacacctgtacccgattaggctctgtatatacatcgtcctctttttcaaagatttcatgctctatcggggtttcgggcatccagaacgacggatatttagaccgtgaggtcggcgatggaatagcataggcatagttattccccttacaggattcaaggttcacatccaaccaccaaagctgcgccatagagccgggatcgttggtacaaaccgcaaatttaatggctctgtaatcggggtatgacactacacgccggattcttgtaggtttgaaatttcgaattgactggcacacctgctttcgggtgttatcaatatccactgtacaaatcattttcgttacaaaattcgcagcatcctcgccgtcatttcccaaacaaaaacgcgaatatccggggaatagctgcgtgcgtaaattcgccttatgcagcctgccgttgtactcatagtaacatttccccacttgcgtatggtgtgattgtgtaggctcgtagacaggcatactttcgacatttttcatgtcattataagacaatgattccgaatgtcgattgtctacaaagtcccggatttctatttctttgatcctatataacggttcttgcattaaatcaacatcttccgtgaacaattttctaaaatcataagtctgataataaccgccaccgccgcgatctgacaggctccagttatctttccacgttttttcaaaatcgtaaattgggacgatacgagtagagcatattacgacactttgaacgattcgggtatctattcctgcgggaattttgattgttacctgcggttcaatgtagaacgtattgcttcccggcgaaatttttgccttacagccaaagaaaatgcccgttctgtatttttccggcacgtagttaggcatcccgtcggccacaacatcgccataatcctcttgccaaccgtcgtctccggcgtcagaggcaaatatcatcaactcagagttagcaacgaccgttccgtccatcatcctataagccaccattagagcaatagccccctgccagtattctccgttgtacatgggcaggtgtagcgtttgattcacacggtcggttattctcgtataataatatccaccgtccggggctatattcggatgccgcgcgaggttgtccccgtctgcaaattcttcttttatatcatggttttcccaatacctacgataataaaaatcaactccaaaacgaactttatccgcctttgattcgcttatatccggtggatcgggcatctcaaagcggacatattcgcccccatacaatacaaaataaagctctttattatccgtgacaataacaagtacatgtccgaacgaaaagacggtagaaaggcccgaaactgcgggcatgatcgtctgcgtcgaggagaaagctccatccgcatagcgtacctcgtgaacggctccggtagtgtcaatagcgatatacagatcgtcagccgtcatgggatgcttatagagtagttcgaaaccgtgaaaatctgtcacagccccgatacgccgaaacgcttcgacattgcgccaagcgcccgcgtcataacgcaggttgtgtagcgtttcgcagcttccgtccttaaccgtcagatcggtttccgcccgattgattcccagcaccgggactggttgtttcattcgttccatcttgtaagtagtagttgttattgatttccttatgaatacgttgattcagcaccataaataggctgccgggctccgtctgaggctgctcggccccaatgctgatgtcgtgcagggttttacaggctgctatcaggttcttatccgtcattttgttgcgatgcacaatattggtcagccgattgtagagctcgttgattgccgcatttcgggcctgtatcacccgttccagatagtccccggtgagctcgctttgcacgatcaccgtttcaacctcttgccgaacctcttcgaccgatgcccgtattacctgctgctggtcgctgcctatgctatcccataaccgctttactcgcatcgcacttattccgaactcggcagcaacggcgcgtaaactccccgtctgcacgtatctcacacagactgcgttcttttcatcgtcgtcgagtgttttgcgcgacataagtagctgatttattgatatattccgatcaaaaataaggataattcttatacacgcggtcgctaattttacagagtgataaaatttagacactatgtttccattaatcgcattggccgccatttccgtcgcttcgtcgattgcaggcggcatttctgccaataaaaagcaacgtaaggccgatcagatactcagcgaccgcgagcggaacctcaaggagtggtacaactccgaaatgaatatgccttacctcgaccgagctgattcacgggccatgctgaaacgcatccgggactacaacgaggacgaactaaaggccatgaacaccaacgccgtgaaaagcggcgctacggacgaggcaaaagttgccgccgccaacaagctcaacaaaaactattcgcagaccctcgcccagatcgcggggcttggagaacagcacaaagatcaagtgcgccgcgactatcaagcccgcatggacaaccttacagggacgcgctatcaagcgcaacttggcaaggccgcaggcacgcagaatatgattagcggcatcgggagctccctcggccagttagccatgctctacggtatgggcagcggttccggcggcggtttagcaaattttgcaggtgggaaatagtatggaacaggagaagccaaccacaccggtattctcgattgctgacgagatacagcggcgacaaaaagaagccgacgaacgccgcgccacatgggagcagaaacgccagcgagctaccgacctgtaccgggacggccagaacccgattttggccttcatcgacacgatgaagccccagcaggacaccgaccggataaaacgcgcggaaaaggcggcaaagatcacggcgtggtcgaatttcttatcagcgctgggtacgggtattgtcggcatggccaccgagggctacattcccaagaccggcactgatgctccgatgaagatgcttggaaagatcgacgagtgggataaactctacaacagccagaaccgagaataccaacagttacgcctgcgggcacttatgggccagcaacaaggcgagcagcaagccgccaacatggacgctaccgccgccgggcaggattacacgttggcccaaaagcaatacgacacattgatcggcaacctctggaaagcccagcaggaaaaagagaaacgagccgatactttggacgataaaatgaaagtcgaaaaattacgaggcgaaaacaacatcaaagcagcccaagtgcgggccgcagcttcggcagcggcagccagcgcccgatctgctgcggcagcggataaatccgccgttcaattcctcgatcgggacgaacagaccgtcgtaaggctcaatccggcacaagaaagcctgctatacgagaaaggccgcgaaatgggtataattcccgaagatggcaccccgacaaaagaaccgacatacacgggtgaaaaggtaccgcagttcgtctttgggaagctcaaaccggcacagaaagcccagatattacgtgccgtctacctcaagctgaacggcgtaaagcagaagccgcaagcccctgccgatctggggctcctgttccgccccgagaaacgctatatcgcgggcccggtttcgaatgatgtgcgcaaagtgctggaaactccgcaggctgaacggatgcgtgaggctggttacagcgaccaacaaattatcaactactatctggattacgaatagctatgccactccccgaactcacacctgaacaactcgaacagcttaatgcgatctccggtctgggaaagacccgcaaacgcaaagatgctccgtctggagacaacctgccggacgttgcaccggcagaccttatgcagacagccttacagcaggacgataacgccggatttgagccgttttcactcccggagcgcaccccggatatggataacgaggtatacgaggggcttattaaagagagtttacaacagcagttaggggcgatctatgaccgagcccgacagcgggctgatgccaacaggacaaagatgctggcaccctttgacgaggcaatcgaagctgatataccggcatggaaaaaggcatttatcgctcaagccaaatcaagcacgctccgtagtccgtccggactgggcggagatgatacctacctaatgcaagcgacagagcgggcattgaagctcctaaaccagaaaaccgtaaaggacaagcaggccggggacaaatcatccggcattgcccgtgaggtgttcgattggggcaccctcggcgacctcgctacaatggggtttggggagttaggcgagaatatcgccatcacacgggcgctcaagaaagccgcaaaaggcgaacatctcacacctacggagcgggacatgatagaccttctccggtatggggaactgataaaccaatacacggcccaacggggcgggccaacgaccggcgcaaaggtcggcagcggcattgccgcctcattaccttatatggcgggcttcggggccaccagcaagatcggcagcagcggagccaacaccctcggcaaaatgctgctcaaaaaggaagcgaaaacgctcttggggaaagggcttcgcaagctgggcgaatacacggcgagcgcggctgtaatgacacccttacaggcgggtacctactcaaactaccatgaacgggcgcagggacagtacgaggttaaggacaacggcgaggttgtcgaacacctcgaaccgcagtacaacctgatgtataaggccgccgcagattcattcacggacgtatttacagagcatatcggcggggagctcggagccggagtgaaaaaggtgctgggctggcccgtggagcagatcgggcgacgcttgggtataaaactctcgctcgaccgcttcctgccgggatatacccgcagcaagtaccttaccgatttccgaaaccgtacactttggaacggccccgtagacgagtggttagaggaagtcgccgggggtgtcatgtccccgctgctgaccggggagcatgaacgctggaaagaaaatctttccggcgagaacctctggacaacatttctcacaacctcgctgatgggtgcggggttctcggccctcgaactgccgaacgtcgcatcctacgcccacaagaaccatgttttgaaaacgcaagagaaaaaggcgctttcaagcattgagaatgaaaccttacgggcgcaagtattcgaagcgatgcaaaaaccgacgatggccgagcagtcgcaagcgctcgccgcgattgattggcaggcggcaaacatcaaccagattgacgcggcgcacgctgctgactatacccggtttcacatcgagcggcaaatcctcgacggcatggagctcggggatacacaaggcaaacaaatccagcagacagcgcaaactgcgaacgcatgggcctaccgtggtgttgatggtaaaagtcccaccgaggacatcatcactggacaacgcgccgacgggaaagcctacgtcgttctttccggcaacctcgataccgagggccccgacggaacattattcgtcctcgataccgaaacgggcacgccgacacagatcgaccgggcggagttcgagagcttcgcaagcacgcccgttgcggagttctcggcagaacagttacaaatctccgaacagcaggccgcagcggaacaccagaagcgtcaacagcgacaggacatggagatcggcaccgaagcgggcatagaccccgacgaggtagtgcgcgttgtggcacccgaagctccgcagtacacgaatggcgacgaggttgtaacgacagacggtgtgcgtggccgcattaccggcaaacatggcagtagctatgtgctccaactggacgacggacaatttgtttcggcaccgctccacacaatcaaagggcccgcaagccagattcaagaaacagaccccaccgaggcagctatacccctcggcaacaatgacacgaatagcggacaagccgacatcatgcctacggacgttacaccccaagaagatgtagctgcacggctcgcagaaaccatgcaggccgccgtgggcaaagacgaggccccgcgtgctattcagcgtatgatcgacggcacaacagacgcgaaccaagtgcagatttattccgctgcgttggaacggctgcaaaacaaaagtaagggcatgccgagatccacgcaatcgcccgttgccgaggggcctgccgctgcggttcccgcccggaatccccggcccgatattccgaaattcaagcgtgaaaccccgaccccgtatgcgaaacccgctgcggagttgggcgactacctatccattgaggacgtgatactgcgcgacgtagccagcggccttaaattcgcatggaaagataacggtcaacggcgcggacttgcccgcgagttggggttctccggtagcgagagcgagcgtcgctcccgcgtcggcatcctatcccccgacggtatgacacccgaccaatatgcggagaggctttattttcagtatggggccggaaacaacgaggggaacggctaccgctgggatatggacgacatgacgatcaaagatgccgttctggatgtcctttcgcgcatacactcaccccggcaggcttacatggccgcagcacagctacaccagatcgagccgcacccatacgatgacatgacgggcgaagaatacgagcagatgcaggagcatgaggcacgggtggcgcaaatgcaggatgaactactatacgacagcgcatttgtcgaatgggccggacagactacacccgaacaatgggccgagattgacaatttatttaccgagggaacggataattttgcggaaaatgctaactttgaagcgttggccgccaaaccagccccgacaacagaacaaacaccaaagactacatccaatgacaacaattcgcaaagaaccgagcaacctgcgcctgcggcggatggcgaaagtagtagcgacgttggccgaggcgaacggagtgacccccgaacaggtgatgatgcggatttcggacaaccggaaagcgaaccgcgagcagttcgacatggacgcggactggacgcaatatccggcgaccttaccgacgaagaacgaaaggtagccgaggacgccgccgcatccaccgatgccaccgtagagcaactccgggcggcactcaaacgcaaacaggcccaatacacaagagaaaagcaatctatcgggagcgcatacaacgaggataaccaaactatccttttcgaacagccgcaaaacacggcagagggcaacttgtttgacgttccgcgcgatttctcccagcaggtcgttgaaactatcctaaaacctttacaggctgaaatagacaacctgcaagaaaccatattcaaagtagaagcgtcgaaaggaaagatcattgccgatgcgattgcggcccaccgtgcgcaacaacgcctatcattcaatgacacgccccaagcagccccgcaagcccctgtcgggccaaagtccaccgatgcagagtttaccccggctgtcagaacagaatataaccaataccttacccatgcaatcaagacctttccggataaggttttcagcatcttacataatgatctgataaaagccggattcgtgcgggatgttcggcgactggcaaagaaagacgctaccgctgctatcaagctggttgccgaggtcaatgccgctgccgagaaatatgccgggaaacaagtactcacatcccgccacagcatatttgcggaattagagaaaatgcaggccgcccaagccagcgccagcatgaaagctacgagcccatcgacggagcaaagttcgatcttcaagccaacagaacatacacgacactccaaaaccggggccgaactctactccgtaaaactggccgaccgggtagagcgggctatattcgacgatctgaaaaaaagggccaaagcacatgacggctattatagcagttacacccgtagttttctattcaacacctctgaggatgcagaagcattccgagccgagcagaagcgccccgacatgcaggcaacaccggcccctctaaatgacatgccagcagcccccgaaacatacaccggcaacaacgcaggacacctcgtcccggcggtaagtgcagagaaaaaaagcgatacagaatacaatgccgcagaaaagccgaccgagtacggagcccagaacaagctggtaacgtcggagcgatacgaagaattgaaacggcagatgcgggccaagctcggccagcttaacaccggattcgaccccgaaatactcgctatcggtacacaaatggctgcgttccatgttgaggccggggcccgaagattcgcggattatgcccggcggatgctcgccgatttgggggaggctatccggccttacctcaagccgacctatgtaggcgcactccacatgccgggcatggaagaatataccgcgcaaatggacacatacagcgacgtgatgcactttgatctggacagcctcgacaagccgcaatctgcggcaggacagggagcagcaccgagcccggccatagtccccgaagccgacacacagcgccgtctggcaggccgctatgacactactggaaccacggagaaagacatacacgaaaccggcaatctgcggcccgagaaaaaattccgcaaagaccttacgcagttcagtaaagaactcgtaaaggcgctgggctgggaacataaaacagacaaaaaaggtaagacgttatatgccgaaactaatatcgcaccggcaggcggcgacggctccatcacgctcttgccggcggattccgaatacggaatatacataaatattcccgttcatccctctggatatatagccagtagcgactatactgatgatttggtaattgaagatatattaggagccggtagccccatcctataccgtgtctgcacgaccacaaaatcatacctgctcgatgctccaaaccgctatgccccggcagatattaccgtcggtgaaatggccgaacttgctaaaaacgaattaaattcatatattcgccgtaagaacgcaccggaacccactactcccgatgcctcggacggcacaaaaccaaacaaccatgaaaaccctgcgaacaatacagaccgaatgggcccggacagccctttgggaaatggccgaatacctgccggggatgcttctgcgtatgtaccgcgaggaaccgagggagttggtaacgtggatagaggaaaccgtagacaaagcgttggattggaagaaagcggcgctggcgaacgggagcgacccgcagttagtcgaagaactgttccgggaacgtctgaaaccggactactgtccggaggaacccgagccaatcacgatcagcgaggaacagatggccgagatcgtcgccgatctggaaaaaatagccgaaaccatgtaatagagcgcgggcgcgacatcgcgccccacggcgaggtcagcaagatcaaagcgaacctgtcggctatccgattggtaaaacagcttgaagccgaggaacgcgaagcaactgccgacgaaaaggccgtattggagcaattcacgggctggggcggcttatcatccgtatttaaagggggtaattcctatttcaacgaactacaagagttattaacccccgaggaatacgaggcggcccgagcatccacgactacatcattctacacaccgcccgagatcgtttcgtccgtctgggacatgatcgagcggcttggattcgccggtggctccgtgctggaaccgtcggcaggtatcggacactttttcgggcttatgcctgctgcgttgagtgcaaaatccaaccttgcgggtgtagaaatcgacgagatttccggacgcatcctgcgggcactctatccggatgcaaccgtaagggttgagggtttcgaacagcagcgcatccccaataatcggtacgacctgatcgttacgaacgtgccgttcggggcgatcaaagtacacgacacgttcgacaaagacctgtcggccaagttcgacattcacgactatttcatcgccaaaagtgtacgcaagctcaaaccgggcgggctgggggtgttcatcaccgccaccagcacgctcgaccgcagcacagctctgcgtaactgggtcgttgccgacggcaacgccgattttatcggggctgtacgtctgaatacagcgacattcaaacaagctgcgggtactgaaacatccgcagacatcatcatcatccgtaaacgggacgaggccgggcagtcgtcatacgcggcgaatatgcagaccacggttttggagcgcgaggctccatatattaagtacgtcaaaaatgataaaggtcgatttacaagcgaagatgccacggcacggatggtttacaacaaatattatttcgatcatcccgagttcatggccgggcagatgcggttcggcttcgaaagtggtgtagaaatccgtcccaccgagcagcgctgcattccggttgtggctatcgaccaaaaccaagttataaaacaattcatcgcgtcactcccgactgatctgtattccgtaaccccctcggttccggaacaaactcggactatgatagccccagatggcaccaaagagggtgcccttacgctgatcgacggcaaaccgcatatagtccaattcgggtctgcaatccctgtggattggaaccgccagaacgtaaagggccgtagtaaaaccgtagtattgaaagagtatttggagcttaaaaagaccatatacgacctactcgatgcagaaaacaaagacctgccgaatatcgaacggttacgggcagaacttaataatctttacaccaaattcacccaccggtacggtacactttcaaagaatacaagccttacatttctgcgggacgacgtagactatcccgcaatcgcagctattgaaaatgtcgaagaatcgaataatccgggtgaaaagaaaagatttaccataaccaagtctgatattttctctcgcagggtcattgagccagtacgtcagccaaaagccgaaaacgagaaagatgcaatcgcactttcgctttatcaccgtggccgcctcgacctgccctacatcgccgaattactccataagtcgcaagaggacgtacaagatgcaatgcttacgcaggaacttgcatatatcaaccccgttacaggtcttgttgaggaacgcagcgaatacctatccggcaatgtccgcgacaaattattacaggcagaacaggccaatgaaaacggcctgttcaacgccaacatccgcgcattgtcgaagatcatcccgctggacgttccgttaccgcagataaaaatttcgctgggtagcacatgggttccaaccgagctatacgaacgtttttttcacgagaagttcaacgttgaggcgaagatcaccaaaactgcggctaacaaatatattgcacgaataaccaacaaagggaacacggtcgatgcgagcatgggtgtagcggatgcccccggcagcaggctcgcgcttgaccgaatgaacaagacccaaacctacctatcaaaaaaggagtgggacagccttacgaacaaggaaaagaaagttaaagaccccgaagctatggcgcaggcagccataaagcagacggaactggatgaggctttcgagcaatggtgcaagcaacaagacgaggcgaccaccgacaaactgactgaaatatacaatacggcatttaacagtatcgtcgaacgtcagatcgacgtttcgacattcgactatttccccaatgccgcgcacacgaagaaaccccgtgaacatcaaaaaatcggggttatgcgtgggttgcaaggcccgaccttacttgcgcatgaggtcggcaccggaaaaacgatcacgctcatttcgacggcaatggaaatgcggcggctcggaatagctcataagccctgtatcgtcgttcaacgttcgacctatgagcagtttgtaaacgaaatcaaatcattatatcccgcggcccgcgtgctggtaccctccgccaaagaccttacggcatcccagcggcaacagcttttcgccaaaatcgcctacaacgattgggatattgtcgttttgtatcacggttatctggatgctatacccgatgatcctattagggtcaatcagtatatcgacggattgatcgaggaaaaggtagagcagttgaaagaggttgaggcaagcaatcccgacaatgcgaaacgactggcctacggcattaagaaagaaattgaggggctggagaagaaaaaagtaggtagcgaaaaatcaataaaagaggaggaaaaggtaaaatctaacgctcgggcccaagctcaacggctactcgaccgtcgcacggatgaaaccatgacctttgagcagttaggcattgatgcgttattggtagacgaagcacatgcctataagaaactcggttttacaaccgacctgcaaaacattaaaggaatcgacccggcagcgtcccagcgggcacaaagtctacggctgaaatcaacctatattcttgaaaataatagcgggaaaaatgttgtcctcgccaccggaacgccgatttccaacacgatggcggaaatgtggactttcatgcgctacctgctgccgcaaaacgtattacaggaatacaacatagacacttttgatgcctttgcaagcaatttcgggagtatcgaagaatctgcggaatttggaacaaacgggaaatttaaggtcgctcagcgtttcgccagctattcgaatatgccggaattactggcgatctggcagcagatcgcgcatgtcgtattgacggaggatgtatccagcttacgcgagggggttggcacaccgcgcctcgacgggggtaagccgacagatataatgctcgatcaaaccccggccctgcggaaagtcatgcgcagcatccgggatacgcttgaacgtttcgacgctatgcccgcgaaacagaagcgggaaaacagccatatcccgttggtgatgttcgggctggcaaagcgtgcagctattgacgttcggctgataaatcccgatcttccggatgaaccgggcagcaaggttaataatgccgtgcgggagattctcgccgatctgaaatccaccgaccactataagggtaccgcagctatcttctgcgattcttaccaaagccgcgaccggcggttcaatgtctttgaggacataaagcggaaattcattgctgcaggtattactgccgaacagatcgctattatccacgactacaacacagacgaacagaaagcgcgacttttccggcgcgtgaacaatggcgacgttcgaatagtaatgggtactactgaaaaactcggtatcggagttaatatgcaggagcgtttgcaccttctcgtaaatctcgacgtgcctatccgtccaatggactatatgcagcgggttggtcgtatcatccggcagggtaattcccatctgaaaatggatttaccggtgcgtattctgcggctgggcgtaaaacaaacgcttgatgtaaccggctatcaacgcttgaagatcaaagaggcgtttatccgacaggtgatgaaaggcgatatatcatcccgcacgctggaggaacccgacgccgagagtagcgacagcacgaatttcggacagatgatggcgtcattatccggcagccaagcggcacttgcgttgtcgcttgcacagaacaacctgcgcaagttgagaaatgcccgcgactaccactaccagcatcaggcatacgttacccgcaacctcaaatggctgcaaaatatacttgacacgacaccgggcgttatagcaacacttgaaaagcaagggaacgaatttcggaagatatttccggacaatacaatcgtatcagtagaatatggctcacagaaagccgaaaatggcgattatgaaaaactctttgccccactaaacaagcgcatcgaggccgaagccgatgcactacggaaaacgcccgaacgcgatcacgcagagctaaaaactacaatccgtatcaacggaaagacatttgatataaagataggacttaaaaaaacgtgggctttatcaaatgaaaaagatgttcggatattccgcggcatatcctatgtatgcgaggaagcacctgaaataaaaggcgatgccggagccaaaatatcgaatgttttagagcaggttgcctatactatttctggcaagtggtacatacaggaaatagaatcccgccaacttggattggaaacagcaaagcaggactatgaacggctgcaagcgcaggttagcggggcttttccgaaacaggcagaactggaagcaacagaggcccggatagcggaattagaggcacagatggccgcagaactggctgagatcgaagcccaacaaaaggccgatacggacgaagaagcgatagacattgacccggatgaactgctcgacgatgccgcaggcgacagcatccggttccgggatggcagtagttggtttgaccccgaacgtcccgcgagtgacaacaccatagcgcacgcggcaacccgtcttgcaaaaaagctcaacacaccggttgagatcgtcgccgaccttacacacatcacggacaacgacccgctggccctgcggaggaaacgtcgggccaaaggctactacgacccgaccacaggccgggtggttattgtcatgccgaatattacgacccgagcggatgccgaggcgaccgtattacacgagatcgtcggccacatggggctgcgttccctgctgggtgaacggttcgggctattcctcgataacgttcataagtcgctggatgaaaccggcgttcgggccgtggccgacatgatggcccaagagcaaaaacaacgttccggcaaactgacggctgttgaggcccggcggctcgccacagaagaatatcttgcgcggctggccgaagggaacatcaccccgagccgctttgcccgcatcattgggcgcatacgctccatgctccgcgaggcgttgaggttgccgctgcgcatcagcgaccgggacatcgcctatatgctatggttgtcgaagcaccgtcgtatgacggccaagaccgcaggcgcagccgtaaccgaagctgccaccgcacaccgcatccggcagcagctttacagcgttcccggcgacacccgttaccgcgtgatcttcgacgatgccatcccggagaatatcgaacgatatgccgttgagcaatatgttaaggaacgacacattatcggaacattattcgagaacgaacacgttgcgaacgatttcgcattacgagcctatgccctaatcgacgacatgggccgaacgatcatcgaccacatgggccccgaccggctcaaatccatgcgcaaatacctcgcactatttgatctgcaaaaattgaccgacaaagacagttaccggcgggtgatcgacgaactggtagctacactcccgtcagcgaccaagcaggagattatgcgcaccatgagccgacacctgcaatttgtcatgtcggataagtaccgcagccccttacggcggcggacgatggccagcgaacgcccgctgccggagaatttcaagtatgccggagaatttgttgaggaactactcaaacagaagcgcaaacaacccgaaatggcccccagcggcaatatcgaacctacggtgatttacgacaaacaaagttggaaaaaccgtcaatacacccggctcatagacagcacgctgcccgtgcagcaactacaagaggtgataaagcagcgcggcggccagatcgacgatctgacagacctacacaagcacttaaaccacttatcaagcgtcacaaagaccgcgatagacaagtacacgaaagagtatttagaccccatattggattgtattgtgggtatctccaagcagaccggaatgaccgaggataatatcattgactatatcacagccgaatcgtcactcgaacgccatgcctcgggcatcgcggcgctctccgaagatcagcgcgatccgtggaatgataagtatgcccgcaagctggttgccgactttcgccgtcgggccggagacgaacagacacaacagctatggcaggcgatcaatgcggccaatgatcgggtactcgacattctcgttgaggatgggatgctcgctcctgaacaccgaaagttgataaagggccacggctgggcatattatgtacccttatgcgattacgactacaactttgaggacagcgaggggaacccgcaagcgttcgacgcaaccgaaatatacgactttatggacgaaatccgtggcccgcgaccgctacggcaagtactacatgaagccgagggccgcacgaataagccccgaaaccccgtggcccaaatggtaaacatcggcattggggctatcatcgcggccaagaccaaccgggcacggcaggcggctctgcgtttggcacagaacaatagccggggctcggatgatctgtttcgcgtagataaggtctggttggcaaaggggcttgggaaccgctgggtaacaacgactattaacccgtccgttgaggatatagaaatatcgcaggctgcacgcaaagaaatcgcacggctgaaaaaggaactggatgcggcgttaaatgcccatgacgacgaattggccgtttacctcgaaaaccgcatcgacgaaaccgaacgcctaaacatcgtgcgaccggcagaggccgacagccgttttgagaacgaggggcacatgggccaatccatcgagcgacaacgcaatatagagtgtttcgtaaacgggattcggtacatggtaacattcgccgatccagccgtggccaatgccatcaatcagtacaaccgactgactatcccaaaatggctggacgacaccgtgggcaacgcgacacgctggctggcccaagcgttcacatcccgaaatccggcatttgtagcagcgaactttctgcgtgacgtgcaacacgccgcgctgatacatggcatcgaccccggcggcgacctgcgcggattcatgcgcaacattcccccgagcatggcgacgatcacgcggaacgtgcgcggtaaatccgcaccgctgaaggtggcagagctcgggcggctcgacatactcaataccgccgaccgcaaaatgttgatcgagcaatacgggcccgagcgtgtgatggatgcactctacgaatatttccgggataatggtggagaaacaggttttgtgcatagtaaagatgtagccgaggctgaaaaggagatcaagcgttatgtagcgttccgcacgggccgcgttgcggagctcgcaaaagcagcgcagcccagcgagcgccccggcatctggctctcctatgcagcgcagaaaagcggtgcgaaagcgatagctacgggattggaaaatgcgtcgaaagtcgccgagaacacctcgcgtttcgctacattcctcgcgtcactcgatcagggcaaatcgctgctggtagctattgacgaagcgaagaacgtaacggtgaattttaaccggcgcggaacggcaacacgtccgctgggtatgttctacgtctttttcaacgcatcagtacaaggagccgcccagattgcccgcgtagcgttcaaaaaccgtaagcgatttgcgaaagtcgttgcttcattggccgctgccgggttcctcgacagcctgctactcgatttctttttggcgggttccggcgacgatggccgcgatctggtcgtttcggaatacgagaagcggaaccaccttataatcccgtacatgggaaagaacggttttttaaaaattccacttccgcaagggttccgggcattttatggtataggctcgctgctgcatgacctctaccggggcaaagttagggccgaagatgctgcccggacaatgctgacgctgctgtacgaggatttctcccccgtggcttcaccgtcccccaaaggagatgcaacccgcgtgctgatacctacggccctaactccgtggtatgacatctggtatgccggtgaggatgctttcggttatccggtggggcgtcgctcctatggcacaaccaacaactacccactatctgaaatgggccttaaaaacgtgaataaggccatatactatctctgccgaggcatcaaccgattaggaggtggcgacgagaatacaccggctggccagcgcaagaatggcgagatagacccgttattgcggggtatcttcgaatggaaccccagccacgttgaacacgtcttaacctactacggcggcggtatggggaagtttgccaaagacatggtacatacgacacaggccatactgacccccggcgaggaaatcagtagccgtgatctgccgatactcaaccggttttacggcaccgcccggcccgagaacccagcaggcagctattacaacctcaaagactgtttaaccaacattgcggcaaagtacaaacggctcggcccagcgctcgaccgccaagaccccgaggtgcagcggaacctgcaacggattacgatttttaaagcccaccaaaccgccgtgaacaagctacggaaaatcctatctgacacccgccccaacacaccggaatatgaccggctccgggaagaactgaacgaaacgatggtaaaaactctcaacgaggacgaaaatgttacagaatattgacaccaaaaaactgaagctattggcccaagccagcaaaggcatcgcgcagacgtgctgcgagcaggagcgcagcggactgcggtattcgaacgaaaacctttcgctgttgtggcgttgtgcgcaagattgggatgctatgctctacctgcgcaaagagcacgcccggaacctgcgctacaagaacggcgaccaatggtgcgacaaggtgcccgacccggagaaccccggcaagatgatacgcgaagatgcccttatttcccgaagcggcaaaattccgctcaaacacaactatttacagcagtacatccgaaacatccacgggcagcttctttcatcgccgacacagactgtcgtatatgcccgaagcaaagacgatcaaccgctgggcgaaatgcttacgaatgcgttgcagtcgtgtcaccagctaaacaaagtacgaaaactcgacattaatgttgttgaggaattatgtctgacggggttggcttgcgcaaaagtgcgctttgactattggagtaccaagaaccgcaccgacggaaaaatcgacctcgtgaacatcaaccgcctattcttcaataaagacatcgaagacccccggctaaacgacatccggcgcatcggcgagatccacgactatacgttcgacgatctggtacgcaatttcacaataaaccgcgaagacgtgcaggcattacgcgagatttacggcgtttgccacgaccccgcaaagctggaaagcatctacatgcaaaccgccgaacggctccaaaacctaaatttccttttctgcaacgatctcgggaaatatcgggtaattgaggtctgggaacgggtcggacgctgggtgctttacgtccacgactacgcagacggcaccgaggaagtttacaccgaccttactatgcaagaggtcgaagcgatcaacaaccaacggctcgaacagggcacggcggtagggctcgctcccgaagcggtgaaactggtctatgcgcaggagcaatacgaatactactggcgcgtgaaataccttaccccgaatggacattgtatcaaagaaatggaaacgccctacacgcatgaggaacatccctatgtcctcgcagccatgccgatcatcgacggccagtttaaagccgtcatgtcggatattgtcgatattcaacgatatatcaaccgtctgctgaccctgttggatttcattatcggctcgtcggcaaagggcctgcttatggtaccgcaggaatgtattcccgacgacatggacatcaaggattttgcccgtgaatatgtaaaggtaaacggagttatcctactgaaaaagggagccggggataagctgccgaagcagattgccacgaacagcacgaatataggtgcgtgggaactgttcaataccgaaatgaccatcatgcagcagatcagcggcctaaacggagcgatacagggccaaaccccacacgctaacactccgtcaagcctctatgcacaacaggcgcagtactccgcgcagaatttcgtggtgctctttgagaattacaatatgttctgcgaagaacgcgacgaaaagttactcaaggtgctgatgcagttttacacgacacgccgctatgtagatattaacggtaaatcggtcagcgaactggcgaaatactacgagcctgaaatggcccggaagatcgtggatttcaacctgacgacatccaaatcaaccgatacgccggtgttccggcaactgacggacgatctacttatgaagctattggagagcgggcgcattcccctcgaaatattcctaaaaaactgctctattccgggagcggagaagatacaagccgagctaaaaacgttcagcgaacaggctgccgccgggcagatcgaccccgaccggttacaaatgctacaacaggcagcccagcaaaacgccgaccccaaagcgatggatatgctgaaacgatacatggatgcagcgcaatagagccaatatacacgtaatttgttgataatttgtgcataaaagaaaataaataaaataggttttcggtaaatttcgcccctattttgctacatgatttttatattatttattatggatatatcatcaatctggggcatgatcaaggatgccgtaaatgtaagccgtattttttcacacacggaattaaaacagaaatttattgaggttagcaataccgctcttaatcttcaaaaacgcaatgacgaattagagcgagaaattcgccaattacgtgaacaacaagatttaagacacaagatcgagcgtacgaccgacggatattttacgcttaaaggagaaaaccccaacatccgctattgtatacattgctgggatgcaaaacacctgaccatacaagtcggggaagattcaacacccggcagttttttctgtccggaatgtaatgcgtccggggtgtatgataaacaacaatttgataagtcccgtgcagaacgtcaaaccacgtatattgtacgcaggaatataagtcgttatttaggatagcataaccatcggcccggcagtcgccgggcttttttatttcggtcaatacgaattagatatgaaaactaattccccgaaccagaacaattattcatttttctgttatctttgtgataaagattgcgttaccatgtcagaaaagcacacaaagacgatttcggttgagggcaccgaaataactattttgcagatcgacgataccgattatatctgcattacagatatgctcaaagccaaagacggtgattttgttgtcaaagattggctgcggaaccggaacacgctggaatttctcggcatctgggaaaaagtctataatcccgattttaattggggcgaattcgccctaattagaaaccaagccgggttgaacagattccggattagcgttaaggaatatgtagagaaaaccaatgctatcggcctcaaagcccgagccgggcgctatggcggaacctacgctcacaaagacatcgcttttgagtttgctatgtggatcagcccggaatttaaagtatatttggtgcgcgactttcagcggttgaaagagcaggagcaggctcggctgggttggtcggccaagcgggagcttaccaagataaactaccgcatccacaccgacgcggtgcaacaaaacctaatcccaaaagagcttacgccggcacaggccagccgaatctatgcagacgaggccgacgttctcaatgtggccatgttcggcatgaccgcgcgggaatggcgggatgcgaaccccggcaagaaagggaacatccgcgactacgcctcgatcaacgaattgatctgcctatcaaacatggaaaatcttaattcggtctttatttccgagagccggccccaacgggaacggctgttactgctaaaccagatcgccatgcggcaaatggagattttagaaacaggcccggtaaacaaggtgctgaaataacgaaaaaggctatccgaccggatagcctttttaaatgtctatatctttaaaaaattcgtcgagcgttatattatagtattcgcacaaccgctcaagggtggtaagggtaacatttttccgcgctccctcaaggtggcccatattcagcccggtttccgccgatactgttttctgcaataggccagcctttcgccgcaataaccgtaactttgcggcgatcttttgtagaatttcattatttcgttccagatcgagcatatttcattcccttaaaaaaatcctctaacgaggtgtcgtaagtactgcacaattccaccagcgtagcgatggtaatatcctgccgtccgttttctatattcgaaaggtgtatgtttgtttcaaacagcactttttcctgcgacagcccgcgtgcttcccgcagttcccgcaatcgcatccccgcagcccttatcagtttttcgttacgatgtcgcttaatcatggtacaaaggacagaaatttagactttctatttatcactattaaagtctgcggatagacctaaattatatattcgtataaagtattgtctttcaacggttccgaccgatctattttgtaattttgtttttatatttgtgtgggaaattataaccgcatgactgtttttgcagatagttgcaggctggccgtacaaggcagccataccgcaggcaaataagtccatatcccctctacacatacgggcaatgggcttttaggcccggcgcgaatattgcaaagtaccctctatattcggtgatttatgcctatgcaaatcacgggacataccaagggtatccagtatgctgtttggattgaatgataacaaaaggacgccacaatagataaaaaatacctgcgcatcgttgcccggatagaatttttatactacttttgggtaacgattcgctgaaagggcgaattgtagctttgttccacagaaaaccgctaaattttcattgttcggagcaaagacacatagacgctcccacggatcgccgggtctacgaccggcggcgcggggaacaaactttgtggacaccacacgctaccggcgtgggctcttgtgtcttgtattttcgaacgggctttagcgggccttctgtggagtacttggcacaatcccacgccctttttatgcgggttgcataactaaaaccgaaaaagttatgttatattcgcacaaaaatacggctttgccgtgacatattagggaaacaaattgtattgattaccgaactcgcgcccatcctcggatggtgttcaccaaatcaaagacaacttgttacctcggttcgtgtctgtctatccagcactccggggcgcaagtacgatcttgatttgggggctcgcgaggcccggtagtcggattgctacaagcgtccctttctttttccgggccgcaaatcatacccaaacttatgtcacggtctaccaacatccagcaaaactcactacgttccggcggttcgacatcgccgggtgtcggtatgcgtttgatctggcagatcgtgacggggacggtcggtgaggctctaaaatctggtatggtaattaatgtgaacccgcgccgcgtccccctttctgcaaattcattcactccatatactcaattaaggaatctcccaaaatttagcaaaggacaagtcaccggcccaatcccctttgggccacgggtgcggggccaaatctgtgtgaattgcgtcactacctcagccccgcaccctttattattttcatccaacattaatagccacacccgacgtaaaccgggggcggttgaggtattccggtatagcatctacaaaaggctttcaaaggggacagcatttgcggggattattacaactgatggcattacgaataactggagtgttgcctcctattttaccagcaaaaacacatacaggggcatcccgtcgatcatggcaatttgttcttttccagcaagatttcatagtcattttacaaaggcgggggcccctgttttttcatgcggcaaggtaaattctaactacccaattttgccgcacggagtagtcggcctatgcgttagggcgcataataggcaatcggctattcctttcttacaaacgaacaaaaaatattatatgtttgcttcgataagcaggctgaaaaattgtggggcagcagagcccattgcaccctgcccagttcttaatatttcaatctacaccatcgcacacctgcaagcaacacacataagggctgcccggaaatcgaccgattattttttgcgcacaaaactcgccgtgtttgaggggcacggcggggcagccccacacgccgcaaaaccgagagtacgcaaaagcaaggattacgacatcttccgtgaaagctcaccccttataggacagaggcggggcagttccgggcccacaaccgcaacagaccgggactgcccttatactatcacaacacccacaagcaacccacggcaaaacggccctgtactaaggcgtaacagggcatctacgaggcgaagcaatgtccggggttgcttttttaaccagccacttaaatgtggattaatagataatgcgtcgcgcactccttttgcgcgacccacgggcaggcgtcgagttttgagaacaaatgaggcgtcactaaagttcaaaaatcttcatacacaagcgcctgcccgttcctttttgaaaaaaacgttttgctttatatctggtactgctaaccatgaaccggaactttccttaacgaccaaaccaagtataacagcaagaccgggccgggaacattgggagtgccactcgcaaactcccggcccaaacataccgggggataggagatcatccaccatagcggcattacgttatcaaacagatcattgtcaacctatcccccgttttttagatgccagaaagcgggagcacccaaaaaaattgtcattggcttgacgatgtaaggattctttccatacacttatattggggctctcgcctttcttcactctcctatatgccgtcgttagccgcaggtgtgttttgcctcggttggatgatcggtcagcatatccaacggtgccgcatatacacacaacatagacgggcaaataccccgaacattacgcaactggttactaccatataagtgatacaactatgaccaagactacaaacgaacaatgggaatacctctttgaaatcatccaaaaaagtgaaacaaaatatactaaagcgagacagcaagtacttgctttcggggcgagaatcggcttagaagaacgacaaaaactatttcagataagagatcagcaagcaacaataacatggcctcttgccatgcaaatcctcaatactttgccgaccacagacccctaccggcttatggggctaaagcggccacctatgacaggcacactcgccggagcatggacacatcatattctcagttcttacagaaacggattctgggaagatgccaacatttggctgggcggccatgaagaatatctattttcaaaggacaacaccgttgaaatagccacacaatacaataacagcatccaaacctattcattcgaccgcaagacaagatatttacagatcggagaaaggcgctactatgtcgccaaactaaccgacaaacacttggaaattatttggggaaatggggaatcagtatacaagctgcaacttgatcgtttacttgacgggaaactacatatcatacaaaaacaaagtgatgagatttcgtgtgacaacttgccgtccggttactggcgcgttgaaaaagagtatagccgcgaaaccgaaaatgagaattgggtgttagagaaagactatacccaaaaggcaggattctgggtttgggattttaaactcaactcccgtgatattgttgagtataaattcggccaaaggggcacttaccaagccgcgaaaccagtaaccccgcatattatctattttttctttaaccaaaaacgttatttcaacggccaaataatgtttgacggcaaaaataatttttggttatatgtacttaccgatcaaacgggcacacctgaaaacagcctgaaaatgtatcgcttcacccggtgggatagcagtagtttacaggttataggccgtaatatatggtgggcggaaacttacccggtctttgccatgaacacggataactttccacttgaacatttggaattgtggcataacgcgccaagtgatgccgcaactctattcgacacgatggattttatagaacggcccagcgaatatgcagacgagaaatatgcgggggcttacgtctttgcccatgcgttcaaacaaaataaaaaagtgcggacagcagccgatgcaggtttactctaccgtcaatttctcgccatcctcgacatgtggctacaactccgcagcaaggccataataatcagaaatattcggttatttgcattcaaaaaatattccgaatatataaataaattacaagctgagattgaccggctgaaacaagaatagaaaaaaccatagccccacaacggaaaccccggcagtcagtctgtcggggtttttacatggatgcttccgacaatatgacgttaccgggcggtggcttgatactctgccgaatctccacgggtaaatccataagttgtgaaactttgagtacaatgccccggctcatataaatatcgtcatgctttccatcaacagccccatagctgccgtcgggcttgagctcgtaccagccaatttcatccaacgcccgtttatcccgctcaatgtagagaatttcgcgtagccgtttcgtcatttgggttacaagatcggtcttgctggccgcgttggtgtgaaaaccatatttcaccggctggccctctcggatgcgcgtagggtctgaccgcgagaacaggttgtcgtaatgctctttgatcgtgtcgaggattgtcagcgtatggtcgccctcttgccctttggggttgaggctattcgcttcgacggccagcagcgcatgacagtaccattccgcgacctgcacggcccgccatacggttaggtcttggtcgaggtggaatcggtaggtagcgatacattcttccacacccccgtccatcatggcgatacggtcgagtaccgaaataacactccagtcggcattgggactgcgcccgccaatgtcgagcgccaccgcatagcggttggcgatacgccgcgaggtatcaggcagcttccaaaggtgaaaatctccggtggccgttggcacaaaatgtaaattttgcagagcttcgggcccgtaggtcgcatcggcgagcagttccccgacatacagcggttcccggacaaagggccgctgctggcggacatacagcgggtcatgcgccgggcgtccggtagtttggaacgcttcatcggcggttgagggaaactcgctgcacatctgccaatcggtcgaatactcgcgtcgcttctcccggtaccagttgaggccctccaacgtggcccccgcatagaatcgggttagttcgtcgcgcgtcatggactgtataaactcgatcttctgcttttcgttgatgaacggtttatagtaaatgtcaatttcaaaccacggtacgaatagcggagtataggccgatttcccgtctaccgcatcgcaccatgtatcgtgaaagaaattaccgatgccctttgccgtcgattccaaaaccacgacggtaaacggttcccgtggcaccgacccgaggatagtctgtatcacatcctcggggctcttctcttttgtccgcttccataggcccacctctgaaagatgggccatttttatatcccctgctcgcaaactatcgggtttctgcatggagcctatcgaaacgacacaatcccgatctaccagcattttattcttgctcgaaccctcaaaattgcaaaaccgtaccgggcatatttctaccggatgccgcagggccatgcgcgagtacatagagcgaatcgttcgggattgttcttccacatcagacacgattacgctattccagcccgaacggtggaatatctgcacccacgccataagcatctgcgtaacggtggaacctccccattgtcgcgccttaaccagcacgacccggacaggcttccccgcgaataaatcagtaaggagaatatgcgccagcttgagttgggcccggcggagtttgaacgggacgaggcggcccgtggtcttgtcgaagattttaacgcaggagatacaccaaaactcaaaatcatacacagcccggagccgatgcacgacgccacacatgacctcagcagcaatgccctcgcgtgcggcgtattgttcgacacccccagcgtcgatgattgcagcaaccgtcggggtctgggccatgtatgtcggtatcagtacataggattccgacgagaaataaagccggacacgttcgatgggcgatccctcacctgtaagcggattgtagggcgcaaacaaacgggacttatgctcctcgttctgggtaagcagcgacggtatatcaaattcgcccattgatgatacgccgtacatagttcgggctcaatccgattacagggtctttgcagagcatttcgacaaaatatgtctttgataagtatttcagccgttcgggattctcggcgcgttcccgcgcaagcatttcttcatagcggcggcgtatctcattgtgcctcttcaaaatcttctcgggcacctcgtcccgtaccctcgttttcctgctcatagtgatacattttgtgcaactatcgcaagtttaataataattataacatcttgaaaattaacaaataagatacttttacatcgaaatctatcacacacaaaatcaatgtgaaaaaatgcgagaggaaaacacaaatcagcagcaggcggaagctccccgcgtatcgcgtgttcgggagtatatgactgcaaaattccccgaccggcagttcgccgacgaggacgactacgaaaacaccctttacgactacctcgcagagagcgacaagaaaatcgccggacacgaggcggccaacaaaacgatcatggaggtagtacaggcataccccgagttcgcgcagatcatcgaggacgtggcgaacggtgtgccggtgcaggttgctattgcccgacagttcgatccgtcggaattggccgttccagaaggtgagcccgattatgacgcatacaaaaaggcagcaaccgagcgcagccagcgcctcgcggacatgaaagcccgcaccgaagcccgcgacaagaacatcgcccaaagcaaaaccgacgtagatgcgttcttcgccgaacatgggctcgacgaggccgaacaaaaacagttcgtcgaatgggtagataacgagattcttgcaaacctgctcgacggcaaggtgaataagggaatccttaccaaactctatcaaggttggatatatgacgcagccgtagccgacgcgctcgaaacaggcaaggtggaggggcgcaacgagcagatcgaggccaagcgcaagcaggcccgcaagacggacggcctgcctgccgacggcggaagcgtcgaaacacccgaacaagcggaaacccccaaagatatgttcgacgaggtaatcgagcgccgtaacaaacgtaagttctaaccaaaattcaaactattatgaaaattaacaaattcctgtacggcgttctggcgatctgcggatgcgtcgtttccgtttacctgtttcgtgaattgctcgcgttcttctctcccgacgacctcggcacgacgctgatggccgtgagcggcgcagcagcgaccgccggtgaaaccatgcgcggcaccgtcaccacgactaagccggcgaaagctgacggaacggtggacgatcaagacatcaaccgcccgacaatttcaaagaagatcacaaagatcaatccctcgctgttcccgatggacacgctgttgcgggaactcgaaaacgtcccgtgcagttcgttcgaatatcagtattacagcgtccggggccgaggcgtgcaaagcaaagtaaaaacagcctacaccgtgaccgctggaagcgagagcggggcaaagcaaatcaacgtaatcaacgcgcacatcttttcgcaggacggcaatgtcttgttccccacgatgaacgtggacgacaccacaaaggtcgccacgccggtagcctcgggtgggttctcgctcaatccgctgatctgccacatcgtcgctaccgattctattgcacaggacaaaatcacgatctacccgatcaacgcagcagtactccccgcgctgcccgctgacactccgatttaccggctcggggtggcaaagcacgagaacgcgggtatgtcggaagaccccagccaaatgccctattcggacagtaactactgccaaattcacatgacgaccgtaagcgagggcctctaccaacgcctttcggaaaaggaggtgaatttcggcatcctcgatatgcgcgaacaagctctgctggatttccgcatgaccaacgaggccgatgcgcttttcggtgtgaaagagcggttcgtagaccccgtgacccggaaagtaaagtacatgagcgacggcctcgtgcgtaagatcgaaaagcatctcgacatgggagccgagagcaagatcagtaacgacctgctgtatggctggtgtagcgacgtattctgcggcaataacggcagcgagcggcgcattatgttctacggaaaagatttcgggaggcagatggccggggcctcgactgttcagaaacagttagaggcgggcagtaccgaggtcgtattcggtatcacgttccaccgtatcagcactccggacggcgagttgttgatgaaaccgcacgacctgctgaacgaatacggctattcgaaggccgccatcgtgattgacccggcaaacgtctatcgggccatacagaaaccgctggaagccacggagctcgaccgcgacaaaacgggtctgtcccgctcaagtgatgttcgtatcgacgagagccacactctcgccgtgacgaatcccgacgcacacgcactgcttacggtgaaataagctactcacaacgacgggagcgggcaactgctcccgtcataaaacccacgacacatggcaacatttttcgttctcaaccacaagaaataccgcacgtccgtccgttgcgctgacgggcgattggaagcggtacgcttcgagcccgaggtatatttcggcggggtcggagaaagcacctacaccacatccgacccggccatcatcgacgcgctgcatgagcatcctgcctatcaggtgacattctgggaaaaggccaccatcacaaccgcccctatcgaggaaacaacacccggcaacccggcgaccgatctggaaacgctgctgtccgacccggccacggccactcgcgaggaaacggtaacgtcagtagcggcagcgcgggcatggttacaggccaacctcgactatgtggtgcccgcaggtatgaagaaagacgacatcaagatcgaagcggccaaacgcaacattctttttattaactggtgatgaagcgcgagcagatcatagcacaggcgcttcggtgtatcgacgagatttatcccgaagataacgcagctaacagcccgaatttcccgcttgctgatttcattgacgaggcgggcaggcgtgttttgctcgcggccccgttgcatacgatttcatcggtagaaagtcttgcggaatgtccgttgaggcccaatcccgacgggagcggcgaaattgatctgcccgctgatttcttacgcctcgcccggttgcgtatggacggctggcaacggcccgtattagttgctctgccggaagatcacccggcagcgacctatcagtatcaccccgttacacgaggcggtatggcaaagcctgtcgtcttacttacgcatggcggcaccaagctgcgctattccagtattacgggcaccgatcaccacatagccgagggcgagtacatcccttacaaggggatcaacgacatctatcccgaaaaactgatcgacgtaaccgcatggacgctcgccgcgctggtactgggtgtttccaacgaaccagccggagcacaggccgcagataaacgcgcatcggaaatattatcgctgctatgaatttcgacgtgaaaatagattgccgggcactttttaacgagtgtgtcgatcagacattactggactaccgcaaccgcacgacggaagccgggcagagtatgactgcgacacatacactcgaactctccctgctcgatgcgttcatgttcaatttacagagtgtcgccgaagctctccgggctcgtatcagtaaaaacgtagaacggctgttattcattcccgacctgctgttattccgtatgcgcgatattctcgacatggccccggaagcaacagccatccgcataaaagacgcgctgaaattcgggatgctcatgtggtggtatggtggtaaggatgcccccttattccagtattaccaaatcctttttggaaatgcgctcgatgatttgcgaagcaaacttatcggttcccacaccgaacgaccataccggatgctatgattacacgggagaacaagattattcggttgtcatgggccaaagctgacctgttccaaacaatatgcacggaaacggcctacaatgcccggacgctggccgacgataaggggttgcctctattcgacaggtacgccataactgctgacgaacgggcctttttcgatcaacacattgccgaagccctcaccaccttatcgcatcactttcggcgtatcgttccggatagtcagccgatggcggttgagggcgacacctgcggccttacgttcacggcacgtctggcggacgacggacgggagctatacggactatccgagctcgacgcagtagaccatagtgcaaccaatgtattatgttatttgattgtttccgagtggtatttatccgtacaggccagcgatttatggaaaacttatttacaaaaactcgccatcgctgctgctgaattatcaacgcttttattccgattctaccgtccggccctaaaacagtcgttcatggtagctcccgacccgagcgaggccccacctaaagattatgaaataaacatcgacgcaggaacaatctaacaatatggaacaatccgaaatattacagtacctcgccgaactgaccggcatagagggacacgctttccaccgggcgatcttgctggaggtcgtcgtatggttcgtaatgatagcagcagttatcatcgacttttccaccggcatccgcaaggcgcgtgttctcaaaatcccgagggacagccacgggttccggcggtcgttcgagaaattcggcgactacggaaaagttaccggaatgttaatgctatttgacctgctggccatactgttcggcatctattcgctcccgtatgcttccgggctggccggggtcggtgtggtttacacggaatacaaatccgtgcgggagaatctcacggcaatacggtcggcagcggtgaaaatgacaacccttgtcgaactactcgccaatgcccacgacccgaaagaaataaccggcttattgttgaaatacaacgaggtcaaagacagcgccgacaaaggcaaagcgcggcgcgatcaactcaacacgttactaaaccttacgcaaaatgaaaatattgattgacaacggccacgggaaagaaacgcccggcaagcgttctccggtatggcccgacggctcacagctttacgaatacgaatttaaccgggatattgcccggcgggtatatgcagtactgacggcccgaggcgtggactgcgaattaatcgtgtcggagatctgcgacatatcattggccgagcgggtgcggcgagtgaacaagatcgcgcgagttgtcggcccaagcaactgtctgttggtatcaatacatgcgaacgcgggcggcggtaccggctgggaagcgtggacatccatcggacagaccgaagccgacaactatgcgacgatcttttacgaggaagccgcccgcgcatttcccgagaagcggatgcgcaaagacatgaccgacggcgacccggacaaagaggaaaatttctacattctcaagcacacgtcctgtccgacggtcttaaccgaaaatttcttcatggacacgaaggatgattgcaaactgatcttttcggggtcgggccgtcagcgtgtggccgacatgcacgttgcggccatcgtccgctgtatcgaatatcacaacaacaaataacctacaactatgaaagtctattacaactccaagctggcaaagcgcctccttttcggcaatttcaaaacctgcatgtttttcgggactgtcatcaccaaactcgcacaactctcggcccgcaccaagcgacacgagggcatccacatccgccagttttgggagtgctgcgtattaggagccgtcctctggtgcctcgggcatggagccgcgcacctgttctgcgggcacctttcggcaggatggctcctgctggtgcctttcacctactacctgctttacggcggagagtgggcaatatcctacgcatatcacatgatacgaggcgatgcccgcgaccgatggaacgacgaagcctaccacgcttcggcattcgaaatggaagcctacgcccacgagaacgagcccgaataccaacataagcgccgatggtttggctttgtaaaatattacggaaaaatctgaccccatgcgcaccgcgacattcatactctcgtttgccatcgtcggacttgcaagttgctcggcaccccggacactcatccagagcagccgcaccgatagtgtgggtatagatcggaaagtagacatccgcacacgcatcgaatacgtgccgatcatcgtgcatatccccgaccagcgggcaagcgcgatcatcgagccgtccgacacgtcgcacctcgaaacggattacgccgtttctgacgcttttatccgtcccgatggtaagttataccacgacctacggaacaagccgcaggagaagccgataaacatccctgttgaggttacagacacgacgacaacccagacaatcgaccggcaagagcgcgaacgcatcgaaatccctgtacctatgccgctgacatggtggcagcggttctggctcacctcgggaaaaatcggctggggactgctgaccggggcgatcatcggcataatcatccgcaaaagactataacaatgaattgctggcgcacaaaagcgataattgcaggcacaagtttcgggatgctattcacggccataaaggacgagatagacataccagacgtgttgcccgagatcatcccgtcagcatggtttgacaatctcgaccgataccgaattacggcccagctttcgacatcacgacgcggcgtgtgcatcgtagcacgttcggacacatcggcggatttgaagatcgagcgacgcgacagcgcccactactttataaatgtcccagcttcagccacggtcgatatggacgagggtgaaatcgtactgacgattgaactccgcgacacgctgaccgatgcagtactcaaggccgagcgtcggacaatccccctaataaaagcacgcgaaatacgaccatgaaattgatttgcacaatccagcagggcaatctaacggttgcggacggctcggcgctttcgcatcggctgtatttcgattttgtaacccgtattggaatcgacggaaaagatggcataacccctcatgtcggcccagacgggaattggtggataggaacacaaaataccaacatcccagccgagggactgcgcagctttcaaacataccacaactttccaaacatcggaaatccgaacatgttgtatctggatatgcaagccagcaaactatatcggtgggatgatgaacacttaacttactgcgtcattggaaaacactatgacgaaatagacattatcgacggaggaaacgcataaaaacctatcattatggcaaacgtaacattaaaagcaaagctcgttcttcgcaacgataccgaatcgaattggataaaggccaatccggtactgataaaaggagaaatgggatattgcacggacaagcagtatctaaaaataggcgatggcacaaaggtattcacaatgctgcctaaaaatactcttgggaaagtcattctttttgatgatcccccaactgatgaagacgcgaaaaaatgggaaccgggaacaatcttcatgcacattatgacaacgccacctacgctgtatatggtgacatggagtgacgatttggaaagggtattacagcaaattgttaccgtcgaaagtttcgacgccctcggggtgatgcagcaagataaatatgcgaaatcagcaggagcggggcccgacaccggatatgtcgataaggcattgatggccgacaaactgaaaacagcccggacaatcgcccttacaggcggcgtaggtggtagtgcctcattcgacggaagcggtaatatttcaatcgcaacgactttatcaattaccgaaaacgacgtaccatcgctgcccctctataaaatccgggatgcaggtacggcggcatcgcgcaatgtcggcaccaccgccggacaggtaccgatattggatgcttccggcaaactaaacacgtctgtattgccgcagcttgcgattgtagatgtcgtagaagccgccagcgacgcggaaatgttagccaaaaccgtacagaaaggtgacatctgcttgcgaagcgatgcgccggcaggggcgtttatcctcgcaggtaacgatcccaaagaactggcgaactggaagcgcatacccgtcccggccaacgccgtattatccgtaaacggaaaagtcggcgttataactcttacgactgacgacatagcagagggcagccgtctgtactttacgcctgcacgcctcaccagctatttacaggatgcgaacaatactttcatcatggacggcggtaacgcatagaaacaatgaatcaaattatcactattcatacgcggtttcagcagcggcgcggaactgcggcacgctgggccgcggtcaatccgatattacaagagggcgagatcgggctggagctcgatacgcggcgcatcaaatttggcgacggcgttacggcatggaacgacctcgaatacagcacacaggaattattcccggcttcagctacccaattaggtggtattattgccgcagacaaaggaaagaactacaccgttgaggtgcagatagaccccaaaacgcatcgactgtatatcccggcatatccgactatgccggagctggccgccgtcgccacaagcggcgactacaacgatttggataacaccccggctccgtatgaactacccgcagccacagaaaccgttattggtggagtggccgcagcgcagataacaaccggctacaccgttgaggtaaaaaaagacccggcatcccataaactttacgtccccgcagccagcggcggcgggagtgttgaggacgacggtaaattaccggggttggttatccgcgtgatctataaacaacaagacaaaagtacgcatttcaccaatgaaaccggagggctgcttaatgcggacatctattttcggcccatgtgtagcacggaatatttcaaccggattatgcctaaactattcataggacttgctcgatgcacgtcacggcaccggcagaagcgagacaaaataccgaaccgctctataatgggcactcaatggcattttgtaggggccccgtcgatcaacaacacccttgccgaacgttatcccagaatatcgacatttacaaacccgacgtttaatgaagctccacggtggacttacgatgatgttgtcccggtgcgagtagcagacctgataagtaaatatagtggagaatggataagatttccgcacgatctggaaacaatagtcagaagatttatctatatctatcaggtgcgcgataccataaccccgcatcaatacttaatactcccaattcacacgatgcaaagaactacattagttaatcgggggtatataaagattagcggccagcggaatcgtaccgtactttcaaaggcgcggactaaaccaagtgaattttacgcctctgtaaatcttgggttctgtttcgcaaaatacatagaacatccacccaatttgcggcattacatttttggccctattgctcaaaaacgggcaatggccgtcagcgccaaagcagaaaatacaatctgctattttctgaaagacatggataaaaaagcacgaatactataaattagggcagcaggtgagcataaaataaattgtgtcgggatgccgactcgcgtaagcatagattaggagccttcgggaacttacgaaagatcagcgtcgtctgcgccctttttacaggtggggattatccccacctttttttgtagataatttttttctgcacgtttatttggttattcaccttttttcatttacttttgtcccgcttaacaatagcaatatttagttttagctgcccggagaggtgcgtgagtggctgaaacgaccggtttgctaaaccggcaagcgggtaaactgcttcacgggttcgaatcccgtcctctccgcaaaattgaaaccgccgattttttcggcggttttttattttccaaaagttttataatagttttataaaaatcattttcctctctataattttcatttttaaggttgaatatacattcaataaatttgcatttgcaaaaattataacatacttttgtagcgttacttacaacgatttactggacgctgtatagtgtaaaaatatttttgcagaaattttttccgtacactggtttgctaaactgacgtacgggattactgtaccgggggttcgaatcccccactctccgccaaggaaagggtgtcgtaccggcagcctgaaataaagacgaccagagggccgtctttattttttttagctccccgttcatcccgcttttttgccgttttgcccgctctggacccagatttgctctgctgcgttatgaaaatgtgaattgattttgtacctttgtacgatatttcgcgcataatggcagagaaagataaagacatactggagaatatcggagagcaggaatataagtacggcttcacctcggatatcgagaccgaaaccatcggcaagggactgagcgaggatgtcgtgcggctgatctccgccaagaagggcgaacccgcatggatgaccgagcggcgcgtggcggcctaccgccactggctgacgatggaaccgccgacgtgggcccacctgacgattcccgaaatagattttcaggacatcatctattatgccgcccccaagcagcagaaaaaactcgattcgatggacgaagtcgatcccgaactcaaacggaccttcgacaaactgggcattcccctcgaagagcagatggcgctggcgggcgtggcggtcgatgccgtgatggactcggtgtcggtcaagaccaccttcaaggaggtgctggccgagaagggcatcattttctgttcgatttccgaagcgctgcgcgacttcccggatctcgtgaagaagtatctcggcagcgtcgtgccctataccgacaatttctacgccgcgctcaacgccgcggtcttttccgacggttcgttctgctacattccgaagggcgtccgctgtccgatggagctttcgacctatttccgcatcaacgccgcggggacggggcagttcgaacgtacgctgatcgtagccgacgaaggtgcttacgtgagctatctggaggggtgtacggcccctcgccgcgacgaaaaccagctgcatgccgccgtggtggagatcatcgtcgagaaagacgccgaggtcaaatattcgacggtgcagaactggtatccgggcgacaaggagggccggggcggcatctataatttcgtcaccaagcgcggtatctgccgcgagaacgcccgtctgtcatggacgcaggtcgagaccgggtcggcgatcacgtggaaatatccgagctgcattctcgccggcgacaattcggtgggcgagttctactcggtggccatgaccaacaatttccagcaggccgataccggtacgaagatgatccacatagggcgcaacacccgcagccgcatcgtgtcgaaaggcatttcggccgggcggagcgaaaactcctaccgcggtctggtccgcatggcgaagggggctgagaacgcccgcaactattcgcagtgcgattcgctgctgatcggcgacaaatgcggggcgcataccttccccgtgatcgacagccgcaaccgcacggctgtggtcgaacacgaagccacgacctcgaagatttcggacgaccagctcttctactgcaaccagcggggcctttcgaccgaggacgccgtggggctgatcgtgaacggctatgcccgcgaggtgctggccaaactgccgatggaattcgctgtcgaggcgcagaaactgctttcgatcagcctcgaaggctcggtcggataacgggcgggaaagatgaaagtgctggtgctcaacggcagtccgcggcgcaacggtctggtctcgcagatgctggaacatattgccggcagtttgccggagacgtgcgacgtcgagcgtattttcgtgcacgacctgaccgtaagaccctgcacggggtgtatgagctgccgctcgaaactccgttgcgcgctgcccgaagacgatgcgcaccgcgtcgcggaggagatccgcacggcggagattgaaaaatgtaaaaaactggcaagaaagatatgttaagcgtaaaaaatctgcatgcgtcggtcgacggcaaagagattctgcggggcatcgacctcgaagtgaaagccggcgaggtgcatgccatcatggggcctaacggctctggcaaatcgacgctcgcggcggtgctcgcgggcaatgagaaattcacggtgaccgaaggctcggccacgttcctcggacgggacctgctggagatgccgatcgaggaccgggcgcgtctggggctgtttctgggttttcagtatccggtcgagattccgggcgtcacgatggccaacttcatgaagctggccgtgaacgagcagcgcaagttccgcggcgaggagccgctgacggccgccgaattcctgaaactgatgcgcgagaagagcgccgtcgtggagctggattcgaaactcacctcgcgcgccgtgaacgaaggcttttcgggcggtgagaagaagaagaacgagattttccagatggcgatgctcgatccgaagctggccattctggacgagaccgattcgggactcgacatcgacgccttgcgcatcgtcgccacgggcgttacgaaactgcatacgcccgaaaacgcgacggtggtcattacgcattaccagcgattgctggattacatcgtgcccgacgtggtgcatgtgctctaccggggacgcattatccatacgggcgacaagacgctggctctcaaactcgaaaaggagggctacgactggctgattaacgattacagggaatgacggcgatactcgatataatccgtgatttccgcacggcgcagggcgaagtgttccggatcgaagggacgcaggacgggccttatgcggcggtcgatccccggcgcatgcgcatcgaggccgccgcgggcgcgtcgggacgcatcgtggtggtgcataccgcgcccgacatgtcgtcgctggaagtcgtcgcggcggaggacgcccgtctcgaaataacggaggtgttcctcgccgaagctttcgcggaggttgcggtgaagcagtccgcacgcagcctgtgccgcctgacggccgtgcagcttacgagcgccaacgtctcctatacgatcgatctcgacggccgcgatgccgagaacatgctgggcggggtgttccttgccggcggtgaagaacactgcgtcgtcaaactgcgcacgaaccacaacgtgcccgactgccgcagcaattcctatattaaaggcgttgccggcggttcggcccgcggcgagttctgcggactggtctatgtggcgcccgatgcgcagcataccgacgcgcagcagcagaaccgcaacatcctgctgagcgagacggcgcatatcgccacccagccccagctggagatatatgccgacgacgtgaagtgctcgcacggcgcgacggtggggcagatggactcggaagccgtgctgtatatgcgccagcgcggcctgagcgaggtgcaggcccgccggctgcagatcgaagggttcgtgggcgacgtcgtacgccgctgcggcgtggagccgttgtgcgagacgatgatggaggccgttagggccaaaatggaaaaattgtaaccatgttcgacgttgaaaaaatacgcggggagttcccgattctcggacgcgaggtttacggcaagccgctggtctacctcgacaacggggccacggcccagaagccgctggcggtgatcgagacgatcgattacctcaaccgggagctcaacgccaatatccaccgcggggtgcattacctttcggaggaggccacgacgctctacgaagcgtcgcgcgagcggatccgcgcctttatcggggcggcggagaaggaagaggtgattttcacggccggcgcgacggcttcgctcaatacggtggcctatgggtggggcgagaaattcgtccgtgcgggcgacaacatcgtcgtcagcgaaatggaacaccactccaatatcgttccgtggcagatgctgtgcgaacgcaaaggggccgagatccgggtgctgcccttcgacgacgaagggcgtctgcgcaccgaactgctgccgtcgctgctcgacgggcggacgcgcgccgtcgccgtgacgcaggcgtcgaatacgctcggcacgcggcccgaactgcgcgggattatcgacgcggcgcatgccgtgggggcgatcgccgtcgtggacggatgtcagggcgtcgtgcacgggggcgcggacatgcaggagctggattgcgatttctacgcattttcgggacataagctcttcgctccgacgggtatcggcgtgctgtacggcaaacgcgcgctgctggaggcgatgccgccgtttctgggcggcggggacatggtcgatacggtgacgttcgcaaagacgacctatgcgcccgttccgctcaagttcgaggcgggaacggccaatttttcgggcgccatcgcgctcggcgaagcagtgaaattcgtccagcgcttcgatcccgaagaggtcgagcggcacgagcaggcgctgctgcgccgtgcgaccgaacgtctcgcggcgatcgacggcctgcggatttacggcacggcgcccggcaaatgcgccatcgtgtcgttcaacgtcgagggcgtgcatccttacgatatggggatgattctcgacaagctcggcatcgccgtccgtaccggacagcactgcgccgagccggtgatggaccattacgcgacgacgggcatgtgccgcgcttcgttcgcgctttacaacacgcaggccgaagccgatgcgctggccgacggggtcgaacgggccgtgcggatgctgcgctgagaagaggaaactaccataactaccacaaacggaaataaaacaggcaacctatgttcattgtactcgaaggattggacggagcgggcaaatcgacccagatacgcatgctgcgccagctgtttgccgacaggggcgtcgagagcgagtatgtgcatttcccgcgcttcgattcgcccgtatacggccagctgatcgcccggttcctgcgcggcgaattcggcggcgtgcaggaggtcgatccctacctcgtggcgctgatttttgcgggcgaccgcgccgacgccgcgccgcagatacggcagtggctcgccgaaggaaaagcggtggtgctggaccgttacgtctactcgaacgtgggtttccagtgcgccaaacttcccgccggcgaggagcgcgatcggctggccgactggatcgtgaacctcgaattcggccataacgcgcttccccgtcccgacctctcgctgttcctcgacgtaccgttcgccttcaccgagcgcaagctctccgaagtgcgcgaaggcgacgaccgcgactatctgcagggcggacaggatatccacgaggcgtcgttgcagctgcagcaggacgtgcgcagcgtctatctcgcctcggcggccaaggacccgtcgctgcgggtcgtcgattgcagcgacgcttcgggtgcgatggagtcgcccgaaggcatcttcgccaaaatccgtgcggaactaaccccaatacttggagcagatgcgtaaaacacgggtattcaaactgatagccaacgtttgccggctgatcctcgcctgcacttttattctttcgggtttcacgaaggttatcgacccgtggggcacggcgatgaaggtcaacgagtacctctcgatctacggtgtcgagtcgctgcagcctgcgagcatggctttttcgatctggttgtgcggcgccgagctgatgatggggtgcatgctgctgttcaaggtccgcatccgtctgatttcgatcttcgccgtgctgtcgatgctgttcttcacagcgctgacattgctgagcgccacgctgattcccgtcgaggactgcggctgtttcggcgaggcgctgaaactgacgccgtggcagactttcttcaagaatctggccctgctgcccatggccttcgtggtctggtggcgctaccgtcccgacaagattttcgccttcaacgcgctggaaatcgtgctgacggtcaccttcttcttcctttcgatgtatctggggtactactgttaccgccatctgccgctgatcgacttcctgccctacaaggtcggggtcaatatctgggagggcatgcacgctccggccgtcgaacccggcgagacggagaccgtgctcgtttaccgcaatctcgaaacgggcaaactgcacgaattttcgctcgaagacaccgcatggcaggacgccgggaagtgggagtgggtcgatacccggactaccgaggagatgcccgccatacgcccgcttatgagcgaattcgccctgcgcgatgccgagggggacgccacggaggagatactgaccgctcccggccgcgtgtatatgctttgcgtcacctcgttcgaccgcctgccgcgcgcctgcgccaagcggtttgccgctctcatacggcgtgcgcagagcgaaggcgcgcgcgtcgtctgtctcacgccccagccgttgtacggcgtcgcctatcacgatttcggatcgggcgaggtacgctgctataacatagacgcttcgaccatgaagaccatgcttcgcgccaacaacggcatggtgctgctcgaagagggcgtgatccgcgctaaaaagaattgtcgcgatattcgtccatagggactttttgcggcgagtggtatgaaagttgaccccggaaacggagtcaactttcttattatgcgaactttccaaactttattcattcttctcgcgctgtgcggctgcggccgccgtcagccggcgcctgagacggtccgcccggtgaaggtcgtcacggcgtcgggcgccggggtcatcgacaaggatttcgcgggcatggctacgcccgacgacgccgtgaatctggcgttcaagctttccggacaggtgctggacgttccggtgtcgcagggcgagagcgtgaagaagggggcgctgctggccgagctcgacccccgcgacatccagctgcaggtctccgccgaccgctccgcatacgaagaggcccgctcgcagctgcagcgcatgcagcggctgctggagcacgaagccgtctcgcagcaggaattcgaagcttcccgaacccgctatgcgcaggcccgctctgcttatgacaactctctcgacatgctcaaggagaccaagctccgggcgcctttcgccagcgtcgtcgagcgcaaatacgtcgataattacgaacgggtgcaggccggacagaccatcgtgcgcgtcgtgaatcccgtgacgacgcaggtgcagttcaccctgcccgaaagcgctctgccgctgctggcctcccaatccacgcgcttcgaggtggaattcgacaactaccggggcgtgaagtttccggccgtgctgaaagattacgccaagacttcgtctgacgcgtcgggatttcccgtatcgcttcgcctgaccaatgccgatccggggcgttatcccgtctctccgggcatgtcgtgtacgattaccatgcagagcgccgacccggttcccgacgccgtgtcgctgcccgtgtcggcgatcttcgctccggccgaaggcggcacctacgtctggatcgtgaccggcgacggccatgtcgtgcgccgcgaggtgacgctgggcgagctgtacggccgcgaccgcgtcgtggtggacagcggcgtggagccgggcgagcgcgtcgtcacggcgggcgtttatcagctgcggcagggcgagcgggtgcgaatcctaaagtgatacggtcatgagtctgcccgaatattcgctgaaaaataaaaaagtcgtctggtttttccttttcgtcctgcttgctggcggcgccctcggcttcgtcacgctgggcaaaaaggaggattcgacgttcgtcatcaaaagtgcgtcgctggtctgcacctatcccggagccacgccgctggaggtcgaacagctcatttccgagccgatcgaacgcgaggtgcagtcgatgcggctggtgcataaaatcacctccgagtcctattacggactttcgaagatcatggtcgaactcgatcctgcgaccggcgccgcggagattccgcagttgtgggacgagctgcggcgcaaggtgctcaacatccagccccggctgccggccggggcttcgcccgttaccgtggccgacgatttcggcgacgtgtacggcatctattacggcctttcggtcgacggcggattcacatggtccgaactgcgcgagtgggcgcagcggatcaagacggcgctggtgaccgtggacggcgtgcagaaggtgacgctcttcggcgagcagacgcccgtggtgaacgtctatgtcagccttgcggcgctcgccaacttctcgatccgccccgaatcgatcgtgaggaccatcggccagcagaacacgatcgtcaacagcggcgagaagcaggccggggcgctcgaaatacagatcttggaggacggggcctataaggacctcggcgacatctccaaccagttgctcatctcctcttcgggcaagcagtaccggctgggcgacatcgcccgcgtggagcggggatacgccgatccgccgcagacgctgatgcgcgtgaacggccgcagggcggtgggcatcggcatctcgaccgaggctgacgtggacgtggtgaaggccggggagaagatcggccgggtgctcggcggccttacgcgccagatgcccgtgggcatggacctcacggtgctttatcccgaagaccgcattgcccgcgaggcgaattccacctttatcctgaacctcgccgaatcggtggcgatcgtcatccttatcatcatgctcgtcatgggattccgcgccggggtgctgatcggcagttcgctgctgttctccaaaggcggtacgcttctgctgatgcagtttctgggcgaaggtctcaaccgcacctcgctggcggggttcatcatcgcgatgggcatgctggtggacaacgccatcgtggtgaccgacaatgcgcagcaggccatgctgcggggcgtcgcgcggcggcaggccgtcatcgacggggccaatgctccgcgctggagcctgctgggagcgacgctgatcgccattttctcgttcctgccgctttatctggccccttcgtccgttgccgagatcgtcaagccgctgttcgtcgtgctggggctttcgctgctgctgagctgggggctggcccttacgcagacgccgcttttcggcgatttcatgctccgcgtcaaacctgcggcgcacgatccctacgatacgaagttctaccggaaattcgaccggctgctggccgggctgctgcgctggcggtggggcgtcgttgcgggcgtcgtcgcgctcttcgccctttcgctggcggtaatgggtctcatgccgcagaatttcttcccgtcgctggacaagccctatttccgggccgacgtgctgttgcccgaagggtataacatccgcgatacggagcgcaacctgcgcctgatggaggagtggctccatgagcagcccgaagtgaagaccgtgtcggtgacgatgggctccacgccgccgcgctattatctggccagcagcagcatttcgctgcggcccaatttcggcaatatcctgatcgaactgcacgaccggaaacagaccgaggaggttgaaaaccgtttcaatgcctacgtcgtggcgaactgtcccgacgtgtggctgcgctcgtcgcttttcaagctctcgcccgtgcccgacgccgcgatcgaattcgggttcatcggcgacgatatcgacacgctccgccggctgacgcaggcggccgaggacatcatgtggcgtacgcccggcacggcgaatatccgcaacagctggggcaaccgcgttccgacgtggctgccgctctactcgcagatgaagggccagcgcatcggcgtcacccgcagtcagatggcgcagggcattaccatcgccacgcagggctaccggctcggcgagtaccgcgagggcgaccagttcatgccgatcctgctcaaggacgagaatatcgacgcctataatctgaccaacctgcaggcgttgccgatcttcacgcctgcgggcaaggtctactccatcgaacaggcgaccgacggtttccgcttcgaataccgcggcggggtggtgaagcgttacaaccgccagcgggtgatgaaggcgcagtgcgacccggcgcgcggggtcaatacgatggagctgttcgccgccctgcgcgattcggtgacccgcgccgtgccgctgcccgaaggctattcgatgaaggtcttcggtgagcaggagagtcagcaggagtccaattcggcgctggccgagtacatgcccctgacgatgatcctgatcttcatcgtcctgcttctgctgttccgcaactaccgcgaaccggtcatcatcttgctgatgatccccctgatctttatcggcgtggtgctggggctggccgttacgggcaaggtgttcaacttcttttcgctgctgggactgctggggcttgtgggaatgaatatcaagaacgccgtggtgcttgtcgagcagatcggcgtcctgcgggccgggggcagagggccttacgatgcgctggtctccgccacgcgcagccgtatcgtgcccgttgcgatggcttcggggaccacgatcctcggcatgctgcccctgctgttcgactcgatgttcggggcgatggccgcgacgatcatgggcggactgctggtcgccacgctgctgaccgtctgcgtcctgccggtcgtctacgccattttctataatatccgtgaatcatgaaaccgtttctgctgtcagtcattctgtttttttgcctgccgccgacgcacgctcagaccacgctcgacgattaccgccgcgacgtgaccgagtacagccgccggctaaaagtcgccgtcgccgggagcgatgccgccgccgaaaccgtggggcaggcgcggacgggctacctgccgcggctgtcgctcgacgggaacttcacggccaccgtccatcattacgacggcgtcgaacgttggaacttcagcgtgctgccccagctggtgcaggtcgtctacggcggcggagccgtgcgtgcggcttaccggcaggccgaattgggatacgacatcgccctctgcgacgaggagttcacccggctcgatgtccgctatacggccgagtatacctactggaacctttcggccatggcgctctatgccgcttcgatgcggcagtatgtcagcatcatccgttcgctcaaggaggtggtggaccgccggtttgccgaggggtatatcgccaagggcgacgtgctgatgatcgacacgcgcctgagcgaagcgcagtacgaactgatctccgccgagcggaattacaccgtggcgctgcataatttcaacatcctgcggggcgccgatcctgcgctcggcgtaacgctggcgcagggcatccgcgattcgcttccgcagcccgtgcgggtgcccgccgccgaagcggcggcattcagacccgactatgccgccgcgcagctgcgcagcgaccgggccgaagccggcatccgcgcagcccgtgcggccttcaatccgcagctgagcgtcggcgtcgggggatcgtggcagccctattatcccaaccgcacgggcgctacgacggtggacggctcggcgttcgtgaaactctcgctgccgatattccactggggcgaacgccgccgcgcgacgggcgtcgcacgtgccgtacagcggcagagcgaatgggacgccgcgcaactctacgacgatatcgtgcgcgaagagatgaacggctggacggcgctggtgaacagccgtgcgcaggtcgaagccatggagcagagcctgcgcatcgccggcgagaacctcgacatcagcacctattcctacggcgaggggctggcgacgattctcgatgtgctgcaggcgcagctgagctggattcagctctataccaacgccatcaaggcgcattacaattatgccgtggcggtgtcggattaccggcggattacggcgcagcagtagcccggaaatagaaatcggagggtccgtcggaccctccgattttttcgccggtttgcggtgtcaggctttcgccggttcggtgctgaccaccgcgatttcgtgagataccggggcgatcatgcggaacatgcgcatgatgccgcagtatttttcgtgcgtcagcgtcgccgcccggctcaccttggcctgatcgtcctcggtgtcgcattcgatgttgtagacgacgtggaacgacttgaatacgctttcggaccggacctcttcggtcgaaagttcgcccgatacgctgatctcgaagcgcttgggacgcaggcgctccttcttcataatcatcagggccgtcattcccgaacatttggctgcggcatagagcagcagggtcttgggattcatctccccgcagtcgggaccgttttcgggtacgagtttcgaatccccggtcagctgcaacgttactttttcaatcatatggctgaatttttattgaacaacgtgctgcgggcaagaatcgtaccttactgccgcattccggccgtctccgcaggctcccgccgcggagccgcttcaggcctgctcagcggatgctgaatcgtgaaccgggtgcctttgccggattcggactcgaccgaaatggcgccgcccagatactcggtgatcgtgcggcagatcgacagtccgagcccgacgcctttgacgaacgagtcggccttgtagaatcgttcgaaaatccggtccagatgctcctgcgcgatgccctttccggtgtcgtggacgaacagttcgacctgttcgcacccctgcggggagcggaagccgaaggtgatgctgccgtcgtccgtgaatttcgcggcgttgttgatgaggttgttgacgacctgcttgagccgcgacgcgtcggtgactatcggtgtgtccgcctgcggcatgtcgagccgcaaacggacgccttccggcatgcagagccgctgagcctgataaatatccgtcagcagggcgtgcagcgagtgctccccgaaatggaattccatggtgttcgattcgatcttcgaaaggtcgaggatgtccgaaatcaggcgcagcagttggtctccgttgctcgttatgagccggctgtactcctgcttctccacctcgctgaacgggatgtcttcgctggtgagcaggttggcgaagccgatgatggcgttgaggggcgtgcgtatctcgtggctcatgttggccagaaacgcgcttttcagacggtcgctctccctcgccttgtcgcgggctgcgcgcagtccgtcttcggaggtcttgtggtcgtggatgctctggcatatccccacgatgcggtagggcgatccgtcgccggtctgtccgaggtatacggactgctcctcgaaccactcccacgtaccgtcaccgcgccggagccggtacgtgaacgtgtcgggattcatctctcctgcgagttgttttgcgaaggcgtcggccagcctgccgcggtcttcgggatgcacgagcctgaagaaatcttcggtgccgatcgtgccgtcgcccgccggaagacccaagtgggcgaaccagcgctcgtcgatgaccatcctgttgtggccgaggtcgaaaaaccacgggaatattttcgtctgcgacagggccatgccgaggatgaatttgcgggtgatctcctcctcggtgttgcggaacagaaagacgatccggcgcagttgccgccgccggtcgtaacggccgacgaaacggccttcgatgtagaatttcaggttggagttccgaagccggatatagctccatggcggcaggtctccgtagcggtgccgttccctgagccgggcgaaaatgccgggcagaaggtcctgccggtcgtgacagaccgaaaggatgtcggagatgttcagcggatgtgaaaaatcccccccccgcggatgcggagttcgtcgcatgcccgtgcgttgatttccgtaatttccccttccggggtgagcgtgacggcgccgacggacagcatgctcagcgtgtcggtatcggactgggcgccggtgcgggaagctgcgcgcgggtccttgtgatgaaaaagacgcgatttcatcgaatggaggtttagcgaatcagtgacgccgcaaggtagggataattttcgacagatgcaaaagcggcggtttgcggagaatccggcaacggcatatatttcgtttccctatgtgagaaaaaggtaaattttcgtatatttgccctttgtaagaatctaagtctcgtatgcggaaaaatctgaatttattgctggcctttgccgtgtgtgcgttgtgcgcgtccggagcgcaggccggaacccccgaatctgctgcttttatcgaccgcggcaggtcgctgttcgacttcggtcgctggaccgacgcccggcatgagttcctgcaggcgcgggagacgctttctcccgccgaccgcgaggcggcgcagacggtcgacttctatctggcggcctgcgccgtcgagctgggcagccgtgacgccgaggccgcgctccgccgattcgaagcgcgttaccccggatcggtctatgccaacgacgtgcggttctcgctgggctcctactattgcgccgagggcgatatgaaacgtgcccgcgaagctttcgaaaagaccgattacaaagccctcggccgggcgcgcaaggagcaatacgacgttcgcatgggctatgtcgaattcaccgacggcgattacgacaaggcgttcggctatttcgaccgcatcggcccgcagagcgaatatgccgaccacgcgctttattacaaatcctatatcgactatgccgaaggccgttacggccgtgccaagcagggcttcacggctttgcagcgcagcgacgcttaccgcgacgtggtgccgtactacctgctgcagatcgaatttcacgagggcaactaccgctatgtcgtcgagaacggcggcaaactggtgcagcgggccgttcccgaacggcgcagggagttggagcgcgtcattgccgagtcgtggttccggctgggcgatttcaacaggacgatcgaacatctggacgcttttgctgcggccggcggcgagctggaccgcgacggcagttacctgatgggcttctcgctctaccgcacggcccactatcccgaagcggcggaatacctgcgccgagcgtgcggcaccgaggatgcgctgacgcagaatgcctcgtaccatctggccgactgttaccttcgggcgggcgacaagcgggccgccatgcacgctttcgccatggccgcggacgaccgcttcgacgcgacgatcgccgaggatgcgctgttcaattacggcaaactgcagtatgagctgggcggcggagccttcaacggcgcgatcaacgtgctgacgcgctatgtggagcagtatccctcgtcgccgcgcgtgggcgaagcccgcacgctgctgatcgccgcttactacaattccaacgattacgacgcggcctaccgggccatcaaatccttcccgacgcaggatgccgacatccgcgccgcgttgcagaaaatcacctatttccgcggactggaagcctataatgccggcgacatgcgcgcggcgcagcgctatcttgccgagtctgcggcgatcaacgtcagccccaaatattcggccctcaactccttctggcagggtgaaatcgcctttgcgcagggcgactatacggttgcggcggccaaatacaacgcctacctgaagcgtgcgccccgcagcgaaaaggagtatgccatggcgctgtacaacctcggctactgcgccttctcgcgtatggacatggcgcaggcgcgcggctcgttcgagaaattcctcgccgtctatcccgcacgtgaccgttaccgcgccgacgcctgcaaccgtctgggcgacatccgctactccgaccgggagttcgaagcggcggtagccgagtacgaccgggctgcggccttgggcggtcccgaaaagtattatgcgcagtacaagcgcgccgtgacgctcggcattctgggccgcacggagcagaagcagcaggcgctgcggcagatcatcaccgcgggggagggcgattatgccgacgaggcctcctatgaactgggacgctcccacatagcgcaggaacagtacgccgaaggcgccgcgcagctggagaaattcgtggccgactatccttcgtcgccgcgccgggcgcaggccctctccgatctgggccttgcatacctcaatctgggcgacaaggagaaatcgctccgctattacgacatggtcgtcgagacggctccgcagtcgtccgaagccaagggcgcgatggaaggcatccgcgagatttacgtttcggagggccgggtggacgactacttcgactatgcgcagaaggcggggctggagagcgatctgaccgccgtgtcgcgcgattcgctgtcgttcgcctccgcgcagaaactttaccttgcgggccagaccgatgccgccgccaaatcgctgcgcagttacgtcaagagctatcccaagggctattacgtgaacgatgcgctctatttcctgagcgactgctacctccgctccgatcagcgcgacgacgccatcgaaaccctgacgacgctggccgggcagggaacgaaccaatatacggtcacggtgctcgaaaaactctcggatatgaccttcgaggacaagcgttacgacgaagctgccgccgcttaccgccagttgtacgacgttacgacgacggtcgccgggcgtgaggacgccatgaagagctatgtgcgtgcgacgctggccgggggcgatgcggcgaagatcgaagcgatggccgccgatgtcgcggcgcatcccgacgccggggccgtcgcgctgcgcgagtcgaaattcgcatgggccgagctgctgcgtcggcaggaccgccgcgccgatgccgtgaaactgtataaggaactggcgtccgacgtccgtacaaaggagggctctgcggccgcttattacgtactcgaagatgttttcgcgagcggcgatatggacaaggccgagaaggcgatattcgcctattcggagcgtgagccgcaggcgtactggttagccaaggcctttatcctgctgggcgacgtctatgtccgcaagggcgacaatttccaagctagggcgacctaccagagcgttgccgacggctattcgcctgccgacgacggcattgtggccgaagcgaaagaacggatcgcaaaactgaactgatgatgaaacgcatattgtttgccgccgcgctgctggcggcgcttccctgtagcgtgagcgcgcaggtggaaaaacgggtcgaagtgaccaaagcctatgttccgagcgtcgaaagcgccgcgaagctggccgtcgtgcccgatatgaccgatacggtgaagatgcggcccgaaatcgactatacgatcacgccgctgtcgctgcagacgacactcgccacgcggcctatccgtccggcgacggtgacctattgggaattcaaccgtccgctgccgttctacctgaaggccggggcgggctatccgctcaattcggtgctggatttctacgcttcgagccagaaccccggtacgggttatgttgtggggtacgtgaaccacgagggccgctatgcgaagatcaaaaacgacttcggcatcagaaacaactcgacgcggatgctcaaccgcatcggcgccgcggccggcaagtatttcggcaaacacattctggagggcgatctctcgtatgaaaaccgtatgtatcaccgttacgggatgtatgtcgcgtcggacgtcacgtcggacatggcccccggcgcaatggccgattacggcgatgcgaatatcgcggtgcgtttcggcgatgattttcaggacctgagccgtgtgaatttcgaaatcgcgatccgcggcgggctgtttttcgaccactccgagtggccggattacaacgacaaagcgcgtcagaccacgctggagacccatgcgaagatcgcccgcggattcggccgccaccagcttgcggcggagttcggttatacgcggctggccggacagaaagcgatcggcctttataatcagcagctgatccatgccgccctgcgttacggtatcgagggcggggtagtgcgtctcgaagcgggcgccgactattaccacgacaaggtcaagaccgtcgacgcggagaattacatcattcctttcgtccggctgaacctgaacctcggaacggacggactttgtccctttttcgagatggacggcagtgtggacgacaacggcttccgctcgctgacccggcagaatccttacgtcgccgcagcgttctggcagaccaagagttcggtcgattacaacggccgtttcggtatcggcggcagtatctggcgcggaaagttcgactacagggtgtatgccggattttcggtccgggacaaccatccctattggtatgtttccgacaattatgcgatcgacggggaaaaaacggccgtcgccggagccatgcgcccggcactggcccgtcagaccgtactttccttcaacggcgaagtgacgtggcgtccggtgagcagtttccggacggaattgggcgtacacggatatatctacaacgacgacgaaaccaaattgcacaacggcgcgccgtccttcgacggtagtctgtcggcgcactacgacggccgcaagatttcgttcggcgcgggagtctacttgcagagtgcccggaagtggagtgcggttttcgaaaatacggggacggaaactgcgcccggtgaacctgtgatgcagtacgatactttcgaagcgcccttcgccgtcgatttgcgcgtcaatttcgactggaaagtttcgggccgcgtgacgctcttcgccgagggccgcaacctgatcaaccgccgcctgtacgaatatccgttctaccccgaatacggggctaactttacggtcggcgtgaaggcgaacttttaaaaagatttcctctccatgccggttgggcgcatataaattgtctgtgaagagtattcatggaggtaaatttgctatttttgggaaataatattgattttgtcaatcacaaactaatttaaacgcaatatttctttaataatatttatggctacactgaagaacctccccaaaatatgtccctcctgcggtaaacgtttgagcgtgcacgcgatgcattgcaacggatgccaaacacatatcgaaggcaattacagtcttcccgtgatgatgcagctgtcagcacccgaccagcagttcgtactcgatttcgtgaagagcagcggttcgctgaaggagatggcccataagttgggattgagttatccgaccgtgcgcaacagactggacgatattatctctcaactaaataaattcgaaagcgatgaacaagattcttaacccgttcgaatacctgtctacagggaaagcgctcggttggggcctcgcgggaacgctcttctccatctgcctgctgaccgcggtgagttggcccgtcgagggcgacgtttccaagattatcacgattctgtcgtcgaatttgctgttgtggctgcccctctcgctgctgttgtacgtgatggcgctggtgctctcgccctcccgcatccgggccgtggatatctttgcctccaacctgttcgcgatgctgccgatgatcgttattctgggagtgctgagtctttgttccatgtggctggggagcattgtctgcgaaccccgcagcgcctgcgaggtcttgaagcaggcagcctacaatctgatcgtgatcgtcctgtcggtttcgatggtctggtcgatggtctggggctgtttcgcctatctcgtttcggccaatatgaaaggatggaaaagcatcgtcgtttttgtgatctgctatgtcttcgtgagtgtggtcaaccaattgctgatcgaatacaccaaatagggcggagtgccgtccgacgctatgcggaacccctgccgggttccgtttttcgtttcggcccgacgatggacggccataaaaaaaatatggagctgcaaaccggaatttgcagcgccatatatggttgggtgagctgattatatcgcaccgctacaaccacatacccttgctcgattcctcgcctgggggattctgtaggagctggtcgtataagactcacccggcacaaaagtaggaattttttatatctttgcaaaaattttcgaccagatgcgtaaaaaaactttgctctatatcttttttgcgggcctgtctgttctgctgatcgcgggattcgtccttcgtcagcagttctacggcaatgccgtgaagacggaacgcgaactctttgtcagcagccgggccgattaccgtgcgctcgtcgattccctgctgccggagttgaaacaccattgggcgttcggggtctatgcccggcgcatcaatctggccgagaccttcaagcccggacactatctcctcgaacggggcatgagcgtcatccgggtggcccggatgctcaaactgggcatgcagacccccgtgcgggtgacgatcaacaacgtgcggattcccgcccagctggcgcagaaactcgccggtcagatcgacgccgactccgccgcgatcatgcgggcgctgacttcggacgaagtcgcccgaaaagcgggtttcgacagcctgacccttttttcgatgttcattcccaacacctatgaattctattggacggtgacgcccgaagagttcgtggagcggatgaaacgcgaatacgaccgtttctggacgccggagcgggacgcgctgcgcaaacgcagcggcctgagccggttcgaagtcatgacccttgcgtcgatcgtctatgaagagacgcgcaagaccgacgagatgccccgcgtcgccggcgtatacgtcaaccggctgaaaaagggaatgcccctgcaggccgacccgacgatcaaatacgcgatgcaggatttcggcctgcgccgcatcctgtacaagcatctgaaatatgaatctccgtataacacctatctgaacaagggcctgccgccgtcgcctatctgcatgccgggcatcaatgccattgacgcggtgctgaattacgaaaaacacgactatattttcttctgcgcacgggagacgttcgacggctaccacaattttgcgaagaccctgcgcgagcacaacgccaatgctcaggcgtacagcagggagctgaaccggcgcaagattaaataatttttcgtacatttgtattcatgctgacgaaaatatacgaacagaacccctccgaaagggagttgcggaaagtggtcgatgcgttggaggacggcggaatcatcatctatccgaccgacagtgtctatgctttcggttgctcgctgcgttcgcccaaggccatcgagcggctgcgccgcatgaagggcaaggacgccgaggcctttacggtggttttcgaaaatctggctcaggcggccgagtactgccgggtggacaatgcggcgttccgcatcctgaagcgcaacctgccggggcctttcacgttcgtattgacggcatcgtcgggcatgcccgacaaggcgctcgaaaagcggcgtacgatcggaatccgtattcccggcaacgccgttccgcgggctatcgtcgcggcgctgggatgtccgcttatcaccacctcggtgaaggacgacgacgaagtggtcgaatacaccacggatcccgaactgatccacgagcggtacggccgcgatgtggcgctggtgatcgacggcggcgtcggcgacaatgtgccgacgacggtcgtggatctcacgggcgacgaacccgaaatcctgcgcgagggcaaaggcgagctgcaatgattgggaactgataattctgaatgatataatggaaaagcaaaatttctggaacgatgccgcgaaatgcggcgcgattatcggggccatactggccgtttcgatgatcttggagacgatgatgacactttcgggcagcatgaagtactatgccctgatgacggtcgaatggatcggagtcgtcgtcctgcactattacctgctgcaccgcttcacgcgaaaccgttcgaaactctattcggccgaggagggattctccttcggacagggatatctcttcgtgctggcggtgtcggcctttgctggcgtcatcgtcggaggcgtgcaatatatctacctgcacctgatcatgggttattcgaattacacctcccggctggtcgaagcgctgaccgacatgatggcgttgggcggcggcgtgccggcgtcgatggagtcggtgatggcccagtcgctggagcagattcagaccgcgcctgccccctcggtgcttgcgaccgtctggggcggtatctgggtaagcctgctcttcggcgctgttttcggccttatcattgcaggtgtgctttcgcgcgctccgcggccgttcgatacgcaggccggtgagtaagaactgtaaagcagaagatgaataaactcgacatatcggttgtagtgccgctctacaacgaggcggaatcgctgcccgaactggtcgcatggatcgaccgcgtggcggcggagcacggctatacctacgaagttatcttggtggacgacggttcgtccgacgattcgtggagcgtcgtcgaatccctcaaaaagcagtatccggcggtgcggggcatcgggttcgcccgcaactacggcaaatccgcggccttgtactgcggttttgcggctgcggaaggggaggtcgtcgtcacgatggacgccgatctgcaggattcgcccgacgagattcccgaattgcgcaggatgatcctcgaagagggatacgatctggtttcgggctggaagaagaagcgctacgatccgatcggcaaacgctggcccagcaagtttttcaactggacggcccgcaccgtgtcgggaatcgggcttcacgacttcaactgcggcttgaaagcctaccgccgcaaggtcgtcaaggcgatcgaagtctacggcgagatgcaccgtttcattccgatactggccaagcaagccggtttccgccgcatcggcgagaagccggtggagcaccgcgcccgcaaatacggtcgttcgaaattcggtctcgaacgtatgctgaaaggttatctcgacctgatttccgtactcttcatgtcgcacttcggccgctcgccgatgtatttcttcggcagtctggggacgctgatgttccttatcggcggcggcacgacggtctggatcatcgccgccaaaatctggaagcaggtccacgaactgccgctgagggcggttaccgatcagccgcttttctatttggcgattctggcgattatcctcggagtccagctgtttttggcgggatttttgggcgagcttatcaaccgcggctcctccgacaggaacaaatatttgatagataaaactttatgaccctatgatacaacgaatccaaacgctttacatgctgattgtcacggcgcttatggccgttacgcttttcgctccgcttgcgtggttcgccggcgaggccggagagttcgggctgtatgccttttctttgaaaaccgctgccggcgaagccgtgcagccgacggtttatatgggcgtcgtgctggcgctggcctgcgtgctgccgtttattacgattttcctgttcaagcgccgcctgctccagctccggctctgcgtggttgaaatggtgctgctcgtcggctccgccgttatggaaggcgtgtactactttctcagctaccgggtgtttgcggaacagacgttccatacgcaggtgctgaaacctgccgtcgtgctgccgctggtttgcctgcttttcgcatacctcgccgcacgtgcggttttccgcgacgaactgatggtgcgcgcggccgaccgcatccgttgatcccgaaagactattagccccggaatatgcagaaacgtgcgtattccggggcttttgtctccgattgtgtccgcattggacgccgatgtccgctaattaacctaatcgtaatataaaaaaggcgtttaggcttttgtcggtccggaaaataatgttagatttgaggcataatattaccattatgtaaggaatcgtaagtttttttagaaataaaataaaagtttttaatcaattttaaacaactcttctatgaaaaagttaaaccttttgaggttattgttcggtgcgatgttcctgatcgccgcgacggcgtttacatcgtgtgtggatgataacgatgacgacgggatgccttatcttgaggttgctcccgaagcattgaccttttccgccgagggcgtggccgaaggtgcgtctgccgttacggtgaaaagcaatcgtccgtggacgctcgctttcgaatcgggcgcagactgggtgactccttccgcgaccgatggaaaagccggtacgaccgaggtcgaattctcgatccccgcaagcaacgagagccgtacggcaacgctgagtttccagctcaagaactcctacggcgcctatttcaccaagacggttaccattaaccagggtgaagtcgttcccgaaaaacttgtttataaagaaactttcggaacgacgggagataaaactccggttgcttcatacgatggctgggataagaccggtgaaggctcttcgaccgtaacttatgccggtgaaggggttgatattcgcagtaatctttccagtgtcggcaacggaagtgcctatgaaggttccggtggttctaatttgatgtttggcaccggaaacacttattttacggttcaggatattacgcttcctcagggccaaaccggatatactttgactttcggcgcaagttatttcaatgctcccaatattgagatctacgatcagctgaccgttcaattcagtaaagacggcgaaaaatggaccaatgccattccctatactttcgaaaactttgtggctgagaaaaactggaatcttgcaacgttgaactttacgttgaaggaattctcggagcatctgtatattaaattcttatccactaagaagcctgacggcaactatcgtattgacgatgttactttggtgacgagtgccggtggacagcaggtcgatttggataatggctccgtgacaccgcctgtcggtgatgtagagcttccgactactgttgtgacgcagtttggcgacagtttcaacgatgttattagtggtgttgtttacgattctcccaattgggcgtttacttcgagtgatgctgggtatccggccaatcctaaattgggatggttcggcagtgtatttggagacacgttctatcttcagtgtgctccttacagctcaacgcagaagaccgttacggcttatgctataatgactccgtttaatgtgaaagctgcggataataaagtgttgacgttcaaactggcatggtatttcaatgcaacggcaagtgcagctgacgacagcaagattgagatcgtagcttctactacggtaacaaacgaaacgattaccgatcccagtgtatggactgttgttaagacaatcgagtataaagagggggtaaatgagatcaacgtgtactttgacgagtctgccgatctttcggcttatgccgcttctgataaagtatatgtagctttccgttatgtagggcataacaacacctatcgattggatgatgtctcgttcaatgggggagctaccggatcgcttgttgtcgatcctacggccatttctctcggtgatgcagccggagcgacggcaaaaattacggttacgtctaccggtgactggaaagcgactgtttccggttcaggcttctcgatcgacaaaactacgggtacggcttccgacacttcgattaccgtaactgcttctgaggccaatgcttcttcggaaataaaaaatctgggttcgatagtcgtcagcaatgactttggcaccaagacgatagcggtatcacagaagggggtgtcgaacgacatattctatgaatcgttcggtgatttggaacagaaactcgacaagtggccttatatcaatgaaagtccgtatgtgattcgcagcggattcggctatgtttccggtacgtcagactataaaacagcttacgcttcgaaccgttggacggcaacaacggcttctccgacaagcgcgggcttttcaggtaaaggcttgatgtggttgcaggcaggtaagaatgcatattttacggtgcaggatcttgttcttacaactgaaaagaatctgtcaatccgttttggattgtatggtaatactgatgctttcgatccccaaaaggatgtcattaaactctatctttcgtcagatgccgaaaattggactgaaatagcgtataatctggaaaatgtagatgcaactccggcttggaaatgggcatcggctgatattacgctgaaaaatactgtttcacgtctttctttgaaaattgaatatccgagtggtgcgaccggaactcgtgttgatgatgtccgtattttcgttggcacgggtgggacagagatcgatttgggcggcggtgccgctacgcctgcggttacgacggccaacgcttcgaatgtagccgagacgacggtgacgctgggcggctcgatcgccaatgccgatctggccgactattcggccgtcggcgtggagtatgtggtcttcgccacgggaaatacgcccgattggacaggctccgtgaaagttccggccgcaacgaaggctgcgacatggaccgtagacgttaccggcctgacgaaggagacgcagtacgctttccgcgcctacgcgactcccaacaccggtgatattctttacggcgatcataagacgttcgtaacgaccggcggaagcggcggtgcgacaacaattacgattcccgaactcttggccaagatcacggcgacttctgctgccgaggtgatcgacgaaaatgtgacttataccttcgaaggtgtaatttgcggtgatcccaaagctggcaatgcttctttcggtacgctttacgtgatgactcccggagctacgaccggtggaaacggtatttcgctttacaactcggtattttggagtgaaggtgactataaactgggcgataaagtgctcgtcacgctaacggcaggtgtcgcaaaaggtcagatccgcaattcgattcctcaggtttcggaaatcgggaccggtgaagtgatcgtgcagtcgagcggtaatgcagtaactcctatcaaggtgaattcggtcgccgatatttcgaattatttcaatatgcccgtcacgatcgaagctacgacgagtgctgccggcatgtggatggacagcggagcgaatacgacccgtacgctgacggccggaggagctaacttagccgtatacctcaataaaaatgcttggacaactttcaaagatcagccttatatcgcaacgactgccgaaattacgggtatcggtgcggtgtattccggtcagaaccaaattcttccccgtaatctcgacgacgtgaagaactttaagtctacggcccctatgattatcgatgtaactccttcttcgttatcgtgggcgtcggatgatacggctgaaaagactgtgacgatcgaaggtgtgaatttcaatggatttacgttatcttcgctgacttccttcaacgcgtcggtcgagggaacgaccgtgaagatttcgcctaaaaccgccaatacgggcgatacggacattaaagagactctgactattacggctaccggaggaaacgatgctacagttgctttgacgcagttgaaaaaatcgtcgggtggtgaagtaactcccggtgttgcatatgtttggagccttgtaaatggtgatttaggttcgaaagccgatggtgtgaccatcgttaaaggtacgccagagttggaatggattacgagtcctacttggtcgggatcatcgttctactttggaaacgacaataataaaggtgttcaggttggatctaagaatcaaccggccagccaatttgtattgaaatccacggcatatactggtggggtgaaaaagattgttgttaatagcagtggagctgctagtgctaatgtaactttgaaggtgcaggtcggatctacgacatttgtttgtgatggaaatagcactgctgatttgacgtctttggctgccgaatatacatttgaaaatgcagtagctgttgaaggtgacattgttttaacatgggataatgcaactagtgtagcaggaagcggtaaggctttttatattaagtctgttgctatcaacccggcagaataaccgaatatcgacactccctctcccggcaggaacatcctgccgggggaaggttgtcttaaaatgcgtattttcgcacttagtttttaattgaatgacgttgatatataaatatagttcgcggatgtttgccgcttcccttgcggcgatggtgctgatagctgtcgcctttacggggtgcggtaaggattccgacaataagggaggcgggggcgccaactcggtggagtgggaccctgccaagaccgtgcatcccgatcaggagggcgctgccgtgctgctcgtgaccggagatacggggacgccgtggacggctgaaatcatttcgggagccgaatggatttcgtttaaccggacagcgccgggaggccagactgtcaagacgggaaaggtcggaacgagtttgtccgacaagaatcagtatgtctattattggccgaacaacaccaaggacgagcggcatgccctgatcaggttcgagttcgaaggcgagatgcccgtcgagcttgaactcgtccagtacagtacttcgtcgaacgacaatgtatatgagaccggtcacaatctggtttggcctgagattcctgccgaaaaggtgaatagcaattatatttatgtatcacatttcgctcagctcaagaatcagaatacgaatcagtggtataacgcccgtaactatacgttgtgtctcgacaaaaccaagtatgccgcatggtgggtggcttatccgctgcatagttcgtatacggggtcgggacgcgtggaaacatgggcgtatgatcccaagatcgcagctgaatatcaggctaatttgacccgtagttatcctgcggcgaattacgaccgcggccatcagattcccaatgccgaccgtagcggaaatgccacgatgcaggcgcagactttctatttctcgaatatgacgccccagaactccagcctgaaccagcatccgtgggcggaccttgagaaaatggcccgtgaccattggatgtgttccgacacgctgtatgtcgtaaccggtgcatattggaatcccggtagtacgcttacgacggcagaccgcgacggtaagttatgtcctgtgccgaattactattttaaagtatttgtccgcacggtaaagggtaacatccgtcaggctggtgataaactaggtgattattcggccggccagctcaagtccatcggattctgggtggccaacgaaggcggtcagggtgaggccaaaagctgggtgaagagcgtcaaggagatcgaagagctgaccaagttcgaattcttccccacgctgcctgccgaggtcaaggaaaagacagatgccgcctcttggggattgtaaaaccttaaaatttcagaacgatgaaaaaacgactgatattcactttgttcttggcggcgttcgtcgtaatgtgctttgcgcagaagccctgcaaggtgatgttctataacttggagaactttttcgacaccatcaacgatccggaggtgcatgacgacgagttcacgccggaaggtcccaagaagtggaattccgccaagtatttcaagaagctcggcaatatcgagcgggtgcttttcgacattgctgccgcagacaagaattatccggctgttatcggcgtctcggaagtcgagacgcgctcggtgctggaggacattgtggcgacgcccaaattggcccccggcaactaccgtatcgtgcattacgattcgcccgaagcccgcggcgtcgatgtggctttcatgtatcgtcccgatgtgttcaaactggagggcagtttcccggtgaaaaccgtcgtgccgcagcttcccaacttcaagacccgtgacatcctgacgatgtggggaaccatcgagaacgaacccttcttctttatggttgcgcactggccttcgcggctgggcggcaaggacgcttcggaattcaagcgcattgccgtcggggagcagatgcgccgcattgcggattccgtgctgaagatcaacccggcgaccaaggtcgtagccatgggcgacttcaacgacgatcctacggacgagagcattgccgaggggttgggtgccaaagccaagatgaaggatctcaagccgggcgatttctacaacccctttgccgatatgctcaaggcgggactcggaacgctggcttacggcgatgcatggaatctctttgacaatatcgtggtcacggagaatctggctacgggttccgaaggcaggcttcgtttgcagaaggctcccggatcgaagttctacggcaatatcttcaagcggtactacatgctgcagaaagagggacagtataagggatatcccctgcgtacgtacgtgggaaataactttcagggcggttacagcgaccacttcccggtgtatatctattttgccaaataaattacttacatagtctatgaaaatcaagagtctactaattttagtgctgtcgcttgtgacgctgaccgcctttggacaggacggcggtatcaagggcagggtcgtttcgcgtgcgggacgcattgcactcggcgacgtgaagattacgatgacgccgggcggtacgacaacggtttcggatgcgcagggtaacttcgttttcgaaaatattcctgcgggcgaatattcgctgcagttcgaaactcccgaattcgagacttcgaatatcgccgtacgtgtcggttcgcagatgcgcgacatcaatgcggtgatcctcgtgcccgatacgcagcgtcagatgatcgacgacgcggtcttcgcggagttcgacaccgaaaccaccgacgacgcgcaggctttgcccacgtcgctctcggcttcgaaagacctcttcaataacatcgcgtcctacaagttcagcgaaatgcgtttcaacgtccgcggttacgattcgcagtatcaggacgtgtatatgaacggcattcagctcaacgacgccatgacgggctatacgccgtggtcgttgtggagcggtctgaacgacgctacccgcaatcaggaagttacgtcgggcatcgtggcgtcggacgccggtctgggcggcatcggcggtacgaccaatatcgtgacgagtcctgcgcagatgcgtcaaggcctgcgtgcgagcctcgtaaacggcaactcgatgtaccgtttccgcgcgatggtcacctatgcttcgggctatcaggacaacgggtggtcgtatgccttttcggtttcgacccgtcagggcggcaactcctatgtcaatggcgtctattacaacgctttcggttattttgccgctgtcgagaagcagttcggtcagcgtcatcgtctggcgctgaccctgctgggcgctcctaccgaacgcggtgcgcagcaggcggcgacgcaggaagcttacgatctggtcggcaataactattacaaccccaactggggctggcaggacggcaagaaacgtaacgcccgtgtgcgcaacaaccacgaacccgtcgtgatgctgaactatacgttcgacatttcagaccgttcgaaactcgatctggccacctcgctgcgcttcggcatgaacggttactcggcgctgacgtggcagaatggtcccgacccgcgcccggactattaccgttatctgccgagctacttcgcgctcgacaagaatatgctgggtgcggcttggcagcaggtttactggcaggccaactaccagaatatccgccatttcgactgggataagatgtatcagacgaactatatccagaacgatccggtcgatgaggcgcagtacggtccgggccgtcgttctaactatatggtcgaagagcgtcacaccgatcagctggactggaatctggttgccaacttctcgcatatcttccgcaataactccaaaatctacggaggcctttcgctgcgccggaaccgtacggagtactattcggaggtcaaagacctgcttggcggcgactattgggccgacatcgacaaattcgccgagcgcgacttcggttcgaacgccatcgcatatcagaacaacctcgactattactatcgccacggtcatgcgcacgcagccaaagtcggcgacaaatacggctatgactactatgcgcacgtcctccggacgaaggcatgggctgcctataatttcaatgtcggcggtctgggcgtaaccgtcggcggcgaagtgggatatgcttcgcaatggcgcgagggtctttggcgcaaaggcttgttccccgacaattcgaagggcgattccaagaaactcgactacctgacctacaaggccaaaggcaacttcagctaccgcttctccgcggctcataccgtcgaagcgaatgtcgtttacctgcaggacgcccccgaattccaagcttcgttcgtgtcgccccgtacgcgcaacaccacgactccggggctttccgccgaacgtgtcttcggtgtggatgcgtcgtataacctgcgtgtcggcgacctgaaagcgcgcgtttccggttactatacccgcatttacgatcagtcgaaagtgatttcgtactacgacgacgtggccgcgaccttcacgaacttcgccatgagcggcatcgacaagctccacttcggtctcgaagcggccgtttcgattcccctgtaccgcagccttgccctgaacggagccgttagctggggccagtacacctacgattcgaatccctattacctgcagacgcaggacaacagcggcgatatcgtctccgacggctatgtttactggaagaacttccgcgtggagagcaccccgcagctggccgccaacgtcggtctttcgtaccgcagcaacaacaacatcttcctgtcggccgacttcaactattacaacaacatgtatctgtcgatgagcccgatctatcgcaccgatgcggtgattaccaccggcatgacggccgaggacatcgctcacctgcgccgtcaggagaagttcgactcggcttatacgctcaacgccagcatcggcaagaactggtatatccaccgccagtatacgctgggcttcagcctcgaagtcaagaatatcctgaacaatcaggacatccgcaccggcggttacgagcagacccgtctgacgaagaacaccgagacgacggtgactacctatcaagccttcgactcgaagtatttctacatgttcggtacgacctattatctcaatctctacttccgtttctgacggctaacgaataaaacacgaatattatgaacaaagtatctaaactgtttctgatcgccgcggcagggctgttcttcgttggctgttacaacgattacaggaacccgaaggcggccaagatatatacccgcgccgatttcgagaaagaggggctggaatatatatcgatcaaggacctgaaggcgcagttcaaagccgagaatcccggcatgaacgacgggacggtcgcttcgtggacggtggatgagccgattttcacctccggcaaggtcatctccaccgaccgttacggcaatgtctataaatcggtctacctctacgatgcggagtccgaatcggcgatcgagcttaagctcaatacgggcaactaccttttccaccccgcaggacagatcgttttcgtcaaactgcaggggctggtgctcggcaactaccgcggtatgaccagcatcggtacgacctcctccaacgccagctattcgaatgacaacatcgagagcaagatcatgcaggacgagcacattttctccggcgaacagcagcagatgctgaagtcggatacgctggtggttaccaaggataactacaagacggcgatttcggatgccgctctgggccgtctggtgcgtttcgaagggctggaaagcaagttcggcacggcgccgtggggctacaagaataccttccccaactattttgcgaattcgacgtcgtacgacgtgaactctcccggctggtcggacatcaacgagtgggcgacttgggctacgaaacgcaggctggaaggcgctaacgcggagacctatttctacggctcggcatggtttacctacgacgcggcggcgaccggctccggtaccaatgcggctccgggcaactacgtggtgcgtacgagcggttacagccagttccgcgacaacaagattcccgaagacggctgggtggtgaaccttacggcgatctacaccaagttcacgaacggttcgggtaattatgggacctatcagctgacgctgaatacggacagggacgttaccgtcgtcgagaagtagcggatccgaccgtaaaagagagacccgtcgttgcaatttgcaacgacgggtctctctttttgtccgtttctcagcgtttgttccattcgcccgaagtctggtaatagccgacggcgcgggttaccagctcccggttcttctcttccatcggttcgaggttgtggggattctccgccgtcggaacgacgcggtattgctcgaaccgccgcacgggcgagaggatggtgaacacgtcgccttcgaggtagcccagatcctgataggtggcgatgaatgcgcggttgacgtactgcttgtcgtatatgctgcggccgaagaagtgcgagtcgtagctcatgttgagcagcgagaggagcgttggcatcaggtcgatctgcgagacgatgccgtcgacgcactgcggctccacgaagcccggagcgtagatcagggccggaatgtggtacttgttcagcggaatctcggtgcggccggcgctcgatgcgcagtggtccgccgtgacgaggaaaatcgtgttgtcgaaccacggctgccgcgaagcctccgcgaagaactcaccgagggcgtagtcggtatacatcacgccgccgttgcgggacttcgagtcgtggggaatgctgatctttccggccgggtaggtgaaggggcggtggttgctgaccgtcatgacgtgggcgaagaagggcttgccgctctgcgcgtcttcgttgagcgtgcggatgaccttgcggtaggcgtcttcgtcgcatacgccccagatgttggcgaaagtgatctcttcgggcgcatactgccgctggtccacgatgtcgtagccgttgcccgaaaagaaggtctccatgttgtcgaagtagctgttgccgccgtagaaatacttgacgttatagcccttttcgcgcagcagcgcacccgtggagtgcatgccggcattgttcggccgcttgatgatgctctggccggggcagggcggcagcgagagggttacggcttccagtccgcgcaccgtgcggttgcctgtcgcgtatacgcggtcgaaggcgagtccctgcttgtaaagcgagtcgagtacgggcgtcagacggttcgtgttgccgaaacgctccatgaacgaagcactcatgctctcgatcgtaatcagcacgatattgcggcggatttcgggtccttcgcagcgtacggcgtgcaggttgtcgcccgtgctgccgtaaatcccatggacgaaggcttcggcctgctcttcgggttcggtgatgtagaattgcttgtagttgagttcgttcttgacgaatgcgtcgtagaatttgtagagtccgttggcctgcagctcgtttacatagacgttctggctgtcctgaaaccgggtgttgaagttcagcagtccgacggcgaggagcacggcggcgatgtacgccggtcctgctaccgctttccagcgccagcctttcagccggtcggcgagggccagatcgcggcggaagagataccatgtcacgaccagcgtcacgaggatcagccccagcgtcatcggcacgacggggtaggactccatgatgttgccgaccacctcgttggtgtagacgaggtagtctaccgcaatgaagttgtagcgtacgccgaattcgctccagaagaagtattcgctgagtccgttgaagaggatggcgcccacgtagagcgtgatgatgagcgcgaaccataccgtggtccagtagctgcggaaacccttgaaaaagagacgcagggcgaacgtgccggcccaatagcccaaaacggcggaggcgatttgcggcgcgacgctgccgtattcgtcgaagatcgtgttgcagaaggtcacgtagcagaatgccgcaacgagaattccgaggatgatgtagccccacggtttgccgtacttggtttcggagacgctcatcgagaagagccataggaacgcgaatccgatcgtcgcggcgcagaggtcgttcacggcgcccagcaggaaaacctgcagccattcgccgaatgagaaaccgaggtcggtggtctgctcgttgaagagcagtacgatgcgtaacaggaagcctacagcgattgtgagcaggctaagtttgagatacaggccggaaaccagccgaagactttggcgcataggtgataactgattgttttaattgtctgcaaagttaatgtttttcgtcgggctgacaaataaaaagccagccgttgcggcggctggctttttcagcggattcaggtctgttattcggccttttccttcgcggggcgcatgacgaccttcacgaggttgttgtcgccgaggaccttcttggccatggcctgtacgtcggcgttggtgagcgacctgatcacctgctcgtaatctttcaggtattccagtcccggaccgtatttggcctgaatgtagttcatccagccggcgttctgctccagactgtttttccagctcttgagcatgaattcgcggttcttctcgatgtcctcggtcttggggccgttctcggcgatctcccggatctccttcatcacgatctcgcgcagctcgtccgccatctcttcgttcgtgtcgaagcggatatccagcttgtaggtctcgtcgggaatatactcagtcgaacccgaaacctgcacgccgtacgtgccgcccttctcctcgcggatcgaaatcaggtagcgcgagttgagcgcctgcgtgaggaacgtcagggccgctttgtccttgagcgtgtagggcatcttgccggagaacatgtagtgtaccgagactttcggctgctgcatcggcgccgtaaactcctccgtcacgtcgcccttgacgggggcgcacttgtcgtcagcgaacgtcatggccttcttcgacacgggaatcgaaccgatatacttctccacgagcggtttcagcgcgtcgaggtccacattgcccacgatggtgaacgtaaagctgttggcatccggatagagctttctgtagatcgccggcagggcttcgaagctgaacttgtcgatgatctcggtcgaaatcatctggcggcgcgggttgttgccgtaggccacgtcgatgaatttctcctccatcaggtagtcgggattcgacttcacgttgtcgagctgcgagcgcagcatcttcatcagcgtgttgtagtcgttctggtcgaagcgcggctgcgtgaaattcaggtagagcagctgcatcatcgtttcgaggtctttgggcgagcagtagccgttcacggcgctggcatagttctccaccgagggctgaaccgaagccgacttgcccgaaagctgtttcttgagatccgtcgccgagaatttgccgacgcccgacatcgagttgaatgcaggcatcatctcgcccatgtagaactcctcgtccgagaggatcgacagtccgcctttggccacggcgctcatgcgcacctcgtcggccttgtaggtcgtgggcttcacgactaccttcacgccgttggcgagcgtccactcggtcgtgccgagcgtggcgtcctgtgccgttttctttacgggcgaacctttcagtacggtgccttccgggatcagcggctccttgacggtgttgtcctcatacgcctcgatttcggcgttggcgactttctcgcggatggcgagcagctcctcggccgtcggattcacgatgccttccttttcgggcgccgtgacgacgatcacctgattgcggggatatatgacctgctgggcgaatccgttgaccgcctcgacgttgatcatcttgatcagcatgctgtccagctgccactcggtctcggcgtcgggcatcggggtgttcttcgagtagttgttcagataggtctgtacgaactcgccgttgcggcggtcgttgcggttggcgtaggcgcgttcggcgcggcgcatcaggtcgttctgggcgcgttcgaattcgccctgcgtgaagccgtagcggcggactttctccatttcggtgtagatggcttcgaaaccttcggccagtttgccgtcctgcgtcatggccacgaacgtcgtcgcgttgagcgtcggaatcacgccgatttcgcccgaacccatgcctgcgccgaggaacggtgcgtcgggtttcatcgaaatctcctgcagacgggcgttttccatggtggtcatgtaggcctgtatgacgtcgaacatttcgccgtatatcaggttgttcatctgttcgggaagcgccggacgcttcacgaagagttggattttggaaccctgcatttcgggatcggtgtagatgctgatgatcggggcctcattgtcgggaacggtgatcgtctctttccgggcggcgtcggccgcgggagtcggaatgtcgctcatgagcgtcttgatcttgttttctacggcatccacgtcgatgtcaccgaccacgacgaccgcctgataatcggggcggtaccactggttgtagaagtcctccagctccttgtggtggaagcccttcagtccgtcgaggtagccgatcaggttgcggtgctcgtattttgtgtccttaccgagcgcctgaagcatcttcatggtcgaacgccacgacgcgccgtcgcgggtgcgcagctcctccatgatgacgccgcgctcggagtcgatctcctcaggttcgagcgcgatgaagtgcgaccagtcgtgcaggatcagcagggcgctgtcgatgatgccttcgcgcgaagtggggacgtccttcatcatgtaggtcgtctggtcccagccggtgccggcattgaggttggcgccgaatttcacgcctactttttcgagatactccgtcagcatcttgccggggaggttcttggtgccgttgaaggccatgtgttcgaggaagtgggcgagaccctgctgggaatcgttctcctgaatggcgccgacgtcgtgcagaatgtagaagtcggcctgtcctttcggcttttcgttgtggcggatgtagtaggtcattccgttttcgagcttgcccgtgcggacgtccttgtccgccggaatcggctgctgcggattgaactgggccgctgcgcttgtcactgcgaatgccgcgatgacgagcatggtgatttttctcataattgatcgtataaaggggtttttgttactcttccgacggctggtccgggcggtattcgatgatgtctcccggctggcagtccagctcgcggcagatcgcttcgagcgtcgagaaccggatggctttcgctttcccgtttttgaggatcgagaggttggcgggcgtgatgtccacgcgttcggcgagttcgccgagcgacatcttgcgctttgccatcatgacgtctatattgatgattatagccataatgtcgtcccccccccgttatttgtcgttcctgtcgttatcatggtaattacgttgtttttagatagtcagtttctgctcttcgctgagctgcgtgccgagtgagagcacttcggccatgaagaggaacagaatgccgacgatcacgttccagtaactcagcggaaatgtctgcacgacttcgaaggaggttccttcgagcaggcggacggcctcgttgttgttgaggtacttcatgaaggcttcgctcaactcgcccacgagaattaggatgccgatggcgcgcgtgcgcaggatgttgctgtggcgtagcggctgctcgtcgcggatcgacttgcggagcgagttgatgatcagtgcgatcagtacgaggatcgtcaggtacgaaaggcccgtgatgaccatcagcaggtagcagaagctgttgttgcccatcaccttgaatgcgttgcccagcgtgtaggcttcgtccacggtcaccttcaggtcgagacggctgatcgtcggagtgatgttctccggcaggttgtcgatgcctataggttcgccggcggagcggatgaccggagccgaaacgtagtaggagcgtatgcctccctgcggaatttccatctccagcgtattctgcgcgttgcgccatccccgcgaaaagtcgggcacgaaactcgcggcgaagccgacgatcagcgccgcgaagtagatgatgtagatcatcagcaaatgtttgtgcagtctctttttgttctgcatagcttcggtttttaagtttcgatagtgcaaatttagtatttattttcgaaaaacaaataatatttatcgtttttcgataaaatatttggtcctagacaaaaaaagacgacccgcaggccgtctttgggaaatagtgccgtaaacttattccacgttgtctttcagctgtttccagaacgatgcgtcgatcgccatccggaccgaagccgcgagcacgatcaggacgaacatgacgaggaaggtgatgaagccgacgttgatggccagacaaatggcgtacaagatgccgaacacgatgcccaccatgatgccgaataccagcgtcacgagaaacatcgtccacttgctgccgtacgtcgcgtcgttcgacgccttgatggcctgcatcggttttttgcccttgccgagcaggaaatagaacgaaagcgcccatgacagggacagcacgatgcccggcacgatcatgaatacgaaggcgatgtagatcggaatcaccatcaggccggccgtgatgaggtactcgcccatgtagcggcggtatttgctgtcgaaaattccgagcgggttgattacgctgcctttggccagttcgaccggcagcaggctgatggcgatggtcgtccctatattgatatagggtatccagatcgtcacgagccacaaggccactgccacgaccaccgacggggcgtttttcacgccgatggcgatcgaatccttcagcgtttccgcgaagtcgagttttttcatttccataactaacgatttttaataagggttaatagtcaaacaaatatatgaaaatatctgcaaaaaacgtatctttgtcgggacgcaacgttaaaaatcagcaatatggcagaaaaatcgcattataattaccgtgtcgaaccgcaggacgtggatttcacgctgagggctacgattccctcgctcggttcggccatcctcaatacggcgggcgtcgacgcccacggcaagggcttcggcgtggacgcgctgaacgccgacaaccactcgtgggtcctctcgcgcatggctgtcgaatttgacagccagcccacgcagtataccgattatacgatcgccacgtggatcaacgaatacggccgggtgctctccacgcgtaacttcacgctgaccgatgcggcagggaccgaattcggccgcgccgtgacgcagtgggcgatgatcgaccttaagagccgttcggcgctcgatctgtcgtgggtgggcgacgcccacgccgacgccatcgtcgacgctccgtcgccgaccgacaagccccgcaagatccgcgaggtgaatcctgcgcagacggtcgaacacaaggtggtctacagcgacatcgacttcaaccgccacgtcaatacgatgcgctatatcgaaatgatgatcgacatgctgcccgtcgaactgctcatgcaggagacgccggtgcgcttcgacatccatttcctgcgcgaatgccgttacggccagacgcttagcgtcggttacgagcagcgtggccgcacggcgcttttcgagatacgcagcgacgagggcactccggccgtgcgcgcctctatcgagtggaaataagcctgcggggcgtgtcccgcatctgcttcgtggaacgggttttgcagttacggctgcaaaacctttttcattatggaaaacgcagttaaaacacaaaacaagtatcaggtgagcatcgacctgctgaacgatgccgtgggcaaggaaatcgccacttcactccagtacatgtatttccacacccatttcgaggatgaccgctatcagtacctttcgaagatcatgcgcgaaatctcgatcgccgagatgcgccatatcgaagagttctccgaccgcatcctcttcctgcagggcgacgtcgatatgaacgcttcgttccgcacccggcaggtgaccgacgtcaaggacatgctccgtttggcgctgcagctggagcagagcaccatagattcctacaacgaggcttcgcgcatcgcttccgagcacaaggacgccgtcacgcacaagatgtttcaggacatcatcgccgaggaggagcagcacctcgacaccttccgtaccgaactgcaaaacgtactcgactacggcgaggagtacctcgcgctgcaatccgccgcgggaagcaagcatgccgccaagagcttcggacaccccggcgacggagaatagtccgtcctgccggaccggtaccgcggatgtcttccgggccggatcccgttttttaatcgtatatgcgtttctgccctctgcggcacgggaagtccccgcttcggcggggattttccgtgcctgcgggcggccgatccgccgatgcgccctctgcgtcggcgataaagagcgggaaaacggttgccatgtcgcatattttcctatatttgtactatgaaaattacgattttaggacctgcgcacccctaccgcgggggattggcttcgatcatggagatcatggcccgcacgttccggctgcggggcaatgaggtcgatatcaaaaccttcacgctgcaatatccttcgctgctcttccccggcaagagccagaccgtcgatacgccgcctcccgccgacctcgacatctgccggtgcgtcaatacggtcaatcccttcaactggctccgcgtgggccggcgcattcgccgggagcggcccgacttcgtgctgatgaagtactggacgcccttcatggcgccctgcttcggcaccatcgcgcgcatcgcgcgcggcaacggccatacgaaggtcctctgccagatcgacaatgtcgagccgcatgaacgccacctgaccgataagcccttcaaccgttactacctgcgggccgtggacggcttcgtctatatgtccgagcaggtgcaccgcgaactggaagcctacagcaaggctccggcactcttctcgccgcatccgctgttcgaaaatttcggcgagcgggtggcgcgctccgaagcgtgcgtccggctggggctcgatcctgcggtgggttacgcgctgtttttcggcctgatccgcgattataagggactcgatctgctgctcgatgcgtgggccgaattgaaacgcgcggggcgcgccgaagggcgcaaactcatcgtcgccggcgagttctacaccccgaaggagcgttacctgcgtcagatcgccgacaacggcttgcaggacgacgtgattcttcacgaccgctttattcccgacgagcaggtgaaatactatttttcggccgccgatttcgtcgtgcagccctataaaacggccacgcagagcggcgtgacgcagatcgcctatcagttttgcgttccgatggtcgtcaccgatgtcggggggctggccgagatcgtgcccgacggacgggtagggtatgtgtgcgaaccgacggcgcggggcgtcgccgaagccgttgcgaagatgtacgagggtgacgcgatcgagcgtttccgactgaactgcatcgaggagcgcaagcgtttttcgtgggaagagatgtgcagccgcatcacggagctgtacgaacgggtccgctgatcggcaggtccgctgatcctgcgagtccgctgatcccgcggggcattgggatgcgggccgcatcgagtcgttgcggagcgtatcgagatgctggcgcgggcgtgccttaatcgtagctgccctccgaacccaaaaaaacacgatcgcccgaaacatttgtttcaggcgatcggaatagaaagaggggtgtatctcgcggcggagccggacctcggtcgcaggaacagcgcccggccaagttcccgaactgcagcccgaaaactccgggtaacccgaaaactccgggcaaccctgcagattccgggcaattcagcaaggtgctggtatccggctggctccggaaatctgccggcggataggtccgccccggcggggattaccgtttttcatccccgttgcgaatctccttgcgtcggattttgccgctgatcgtcttgggcaactcctccacgaattcgatgatgcgcggatacttgtagggcgccgtgatccgcttcacgtggttctgcagctctttgatcagcgcttccccggcctgcgtcctgtacttttcgccgaggatgatcgtcgctttgaccacctgtccgcggatttcgtcgggcacgcccgtaatggcgcactccaccacggcggggtgggtcatcagcgcgctctccacctcgaaggggccgatgcggtagcccgaactcttgatcacgtcgtcggcacgtcccacgaaccagaaatagccgtcctcgtcgcgccatgccacgtcgcccgtgtagtaaactccgtcgtgccagacttcgcgcgtgagttcgtcgttcaggtagtactccttgaacagccccagcggttttcccttgtcggtgcggattacgatctgcccctgttcgccgtcctcggccgaacgtccgtcgggcgtcagcaggtcgatttcgtactgggggttgggcacgcccatgctgccgggcttcggctacatccacgggaatgtggcgagcgtgagcgtcgtttcggtctgcccgaaaccctccatcagccggacgcccgtcagctgcttgaaggtgtcgtagacggctccgttcaatgcttctccggccgtggtgcagtattcgagcgacgagaggtcgtatttcgagaggtcttcgcggatcagaaagcggtagatcgtgggtggggcgcacagcgaggtgatgcggtactgttcgatcttgtgcaggatgtccgccggcgtaaatttctcgtggtcgtagacgaaaatattggccccggccagccattgcccgtacagcttgccccaagcggccttcgcccatcccgtgtcggcgatcgtcaggtgcaggctcccgtcgtgcaggttgtgccagaaacaccccgtgctgatatgccccagcggataggtgaagtcgtgcgccaccattttaggttcgcccgtggttcccgatgtgaagtacatcatcatgatatcgtcgttggcgttcacccgctgcggacgcacgaaaggggcggcgtttgcgattcccgcgtggaaatcgaggaatccttcgggaatttccggcccgacgcttatcagcagttcggtcgtcgggctttccggcatggccgccgccacgtggtcggtgatcacccgttcgcccgccgcgacgatcgccttgattccggccgtgttgcaccggtacacgacgtctttcttggtcagcaggtgagtcgccggaatcacgaccgcccccagcttgtgcagggcgaggatcgaaaaccagaattcgtatctccgtttgagaatcagcatcaccacgtcgccctttccgatgccgagacgctggaaataggaggccgtgcggtcggtctcccgcttcatgtcggcgaacgtgaactgaatctccgcaccctgatcgtttgtccagagcagcgctttccggtcgggctgttcctccgcgtaggcgtccaccacgtcatacgcgaagttgaaattctccgggacgcggatatgcaggttctttctgtaatcctcctgcgagcggaaggccgtttgctgtaagaatctctctaccatagcttacatgattatcgccagaaagcggaccggccgcccgtcgagcgccttcattccgtgcggcaggctggaatcgaaatagagactgtcaccgacgttcaacatcaattctttcccgttcaggctcagcagcagacgcccttcgagcacgtagttcatctcctgcccctcgtgactgttcaggtgcatcggggcgtcggccggagtgggttctaccgtcacgatgaaaggatcggctttccggtcgcggaatcccgacgccagcgcttcgtacttgtaggctttgcgccgttcgaccgacacgcccgcacccgcacgggtgatgaaataggcgttcatcttgggctcttcgccgaacatgagcacgtccagactgattccgtaacggcgggctatggtctgcaggacgtttaccgagatgtcgctttcgccgctctccagcgccatatactcttcgacccggagatgacagctctccgccacctcctgcgccgagagttcgagcacttcgcgcaatccgcgcaggcggttggcgattgatttgatgggatcacacattgttttttcgttttaatcgaacaaaccgtatccgccccgcttccgccgggtgcgaagtctgaagtaacaaactgtaagttcgttacgctgatttttacgttttatcctgtctgttttaacctaacaacttggttgtaaatatagtaaaaaatattactaacagcaaccttcggctgtttttctctccctcgatgcggtgccgccgcttcggcactgtacgattaacgggctatgtagcagtaaattataaagggccgccgtgcatcgcacgacagcccttcctcttcatttacttatcgtagtttggctacttcttgatattgggcagttcaagcccgtaatgtttcctgcggtcctcggctttgagccatatgccgagcagcatggcgacgacgccgcagcttgcgaagatcaccatcggaagcgtatagttgtaggctgtaccgtcgatatggccggggttgctgaatttgagcgcatagccgatcacggccgggaagaggcacagcccgatgttctgaatccagaagatcagcgagtatgccgaacccagatagcgggtctccatgatcttgggaaccgagggccagagggccgcgggaaccagcgagaacgagatgccgagaatgatgatcgcgccgtaggcgatcagcgtgctcggataggccggaagtacgaaggcgaagatcaggtggcagaccgtcatcagaattgcaccgaagatcagcatcgtagcgcccttgcccttatggtcgaggtagctgccgagcagtggcgtgatggccgcggcgcccatcgggaaccagcggaagatgtcggcggccgtctgggccgagacgccgaggttgctctccagcatgttcgtggcgaaacgctggaaggggaagatcgccgagtagtagagcacgcagagcatggcgacgatccagaagaccttgctgccgaatattttgccgaggtcgctgacgcggaactcctcttccgagctgttgttgcctttggcgtcgagtcccagctgtttgtccagcttgcggtccatgaacgtaaagaccacgtaggtcagcaggccgatcagcagcagcagggtgcagaacgccaccggacgtacgaccgttgccggcgccatgttggccagccacggcgagatggtgaacacggcgaatacgcccacgcgggcgatggccatttcgagtcccatggccagtgccatctccttgccttcgaaccatttggcgatggtcttcgatacggtgatgccggccatctccatgccgcagccgaagatcatgaatcccagcgatgcgagtttggcgctgcccggaaacgatacccaccagctgttgagccacgtttcgatgcccgaaccgatgaaggcgtcgctcactccgtaatacttgatgctggcgccgatgaacatcagggacgccgagagcactcccgtgaagcgtatgcccatcttgtcgaggatgatgcccgccagaatcaggaatccgaagacgttgaaaatgaactccgagcttccgtacatgccgaagacgtcgggcgtccagccgcgctgggcctcgatcatgctctgcagcggcgacatcatgtctacgaacatgtagccgaagaacatcgtcagcgcgatcagaatcagcgccgtccagcggacgaatgccgaatcgttgagttttcgttggataatttccgtcatagttatttgatttgagttagcttacttctccgtcggcgcgtaacgtttcagcacctcgtaagcctcgacgatacccagttcgccggccttcgaaatgtcgagacaccctttgcgcgtgtccttcatgaatatctgtatgatgccgcggttgtaatacgcctcggcgaaattggggttgagttcgatggccttcgtgtagtcttcgaacgcttcgggcaggcttcccgacaaggcccgcaggttcgcacggttgtagtagctgtaggccagatcggggaagagcttgatggccttgttcaggtcggctaccgcctcgtcgtagctgtacgtgcgtttgctgttgttgttcagccggttcgccgggtccgagtcgatggtgatgcgctggtaggagttgtcgatcgacgagatgaagtcgatcatctcggcgcgcgtggtcgagcggttcaggtagaggaacgggttgctcggattcagctcgatggccgacgagaaggtattgacggcattggtgtactgcttgatgagcgcctgcgagacgccgcgctcgaagagcaccgtccacgaggtttccgccgctttcagctcctcgacatactgcttgtcgagcatcacgagcgtgtcgggtgcaatgttggtttcgcgccacgaaagcgtcaggaattcgttgtccacgcgtttcttgaagtcttcgacgcgctgcacgtggtaacgctccacggccggcacggtgtcggggcgcatcagcgtgaatttgaacagcggcagcaggcgcatctcttcgcgtccgccgttgtggcccgtcacgcggtcgaaactgccgcctgagaatttgctgtcgaatgacagcaggcggtcgaagcgctgcgtcgtatcggcgaatatcgaataggtgctgtcgctcaggcgcgagcggtattccgcgattttcttctgcgccgtgtcgcggtccttcttggcgccctgcgggtcgcgcagcagctcgcgcaggcggccgcggtagatataggcgttggcgaagtcgggatagagcttgatggccgaggtatagtcctcggcggctttttcgatctcgcccagctgggcgtatacgcccgcgcggttgtagtataccagcacgttgttgggcgaatagagcgccactttgtcgtaatcctccagtgcgcggttgtagtcgccgatctgcgtgcgcagcatggcgcggttgaagtaggtcagcgagttggtcgaatcgagctggatcaccttgtcgaagtccgacaaggccagcatcgggcggttggtgttcgagtagaccagtgcccggttgaagtatgacagcaggtaggtcgagtcgcactcgatcgccttgttgaagtcggcttcggcttcgggataacgcttctgctccatgtagagaccgccccggcggttgtaaccgttggggttctcgcggttggtgcggatggcggtgttgaaattgtcgtaggcgcggaccgtgtccttgagatgcaggtaactcaggccgcggcagataaaggcgtcggcgaccttgttctcctgacggatgaacttgtcgaaatcgtcgatggcctcggtgaactgctggttcaaaagacgcgtgacgccgcggctgtaatagggtcccggcaggtcgggacgcagctcgatggcttcgcggaagtcctgcagcgcgtcgtcgtagttgcccagccgcgagcgggtgatggcgcggtaggtgtaggcctgcgtgtagaccggattcatgcggatcgcggtcgagaaatcggcttcggcgcccagcaggtcgtcgaggttgtatttggcgatgccgcgcaggaaatagccttcgaaggcgttttcgtcgaaacgcagcagggtgttgagcgtgcggatggcctcttggtaatcgttgttcatcatgcacgaacgtccgacccagaaaaaatattcccggttgtattgtgcatacgatttcgtcccgcacatcagcgcggcggcaagggcgattcccaagatatatttacgcattttccgactcacttgtccctctaacgttcttttcgggctgtttattattccggtttattccaattcatatccgaaacggcgcagctggcgctcgttgttgcgccagtcgtcgcttaccttgacgaaaagctgcaggaagaccttcttgccgaggaactcctccatgtcctcgcgtgcggtctgtcccacacgcttgagcttttcgcccttgtggccgatcagtatgcctttctgcgagtcgcgggcgacgtagatcgtcgcggcgatgcggtcgatcgtcggttcctccctgtagctgtcgatctcgatttcgcagcagtaggggatctccttgtcgtagaatttgaggatcttttcgcggatgatttccgatgcgaagaaacgcagcgtcttgtccgtcagcgtctctttcgggtagaacgccggaccttcgggcagcagggcgaggatggttttgaacaacccctcgatattgaagttttccttggccgatgcgggtacgatctgcgcttcgggcagctcctgtcgccacttgtccaccagcgcgtcgagcgcttcgggcgtcgagaggtcgatcttgttgatcaccacgacggtcggaatgccgctttcccggatgcggccgatgatttcggccgaacggtcgccctgctccacggtgtcggtgacgtagaggatgacgtcggcgtcggtcacggcgccggtcacgaatttcatcatcgactcctgcagtttgtaactgggtttgaggatgcccggcgtgtcggagtagacgatctggaaatcttcgccggagacgatgcccatgatgcggtggcgcgtggtctgcgccttggaggtgatgatcgacagtttttcgccgaccagagcgttcatcagtgtcgattttccgacattgggatttccgatgatatttacaaagcccgatttgtgcattttctttctgggatatgatccggacaaaggtaacgataaaatgcaccccctccaaacacgggaacgattaatttacccggcatttttcccgattggacccgtcctgccgcatttcccgattttttcgtttatatttgccgtaagtgaaatcccgatgcaaccgcctatgaaaacctcgaaaactctctttttcctgctcggcgccctgctggcggccctgctgacgtggtggctggccggcgacaaacaggccgccgccggcacctccgccgttggaatgccagctgcgggaatctctgccgccggactgccggccgcgggggagcggagcgccctcgacgtgattgcgacgcgcacgagcgttcgcgcctaccgggactgtccggtaggggccgatacggtcgaactgctgctgcgtgcggcgatggccgcgccttcggccatgaaccgccagccgtgggtcttcgtggtcgtggacgacaaggcgctgctccaaaaatttgccgactccctgcaatacgccaagatggcggcatcggcgccgctggcggtcgtcgtctgcgcggacctcacccgcaatccgggcgcttccggcgactggtgggtgatggacgcttcggccgcttccgagaacctgcttctcgcagcgcatgccgtggggctgggggcggtgtggacgggcgtatatccccgcagcgagcgggtgaaggccgttcgcagtattctgggactgccggggtccgtcgtaccgctgaacgtgattccgatcgggtatccggccgagaccccggagcctaaacagaaatggaatccggacaacatccgttataacggctggacggagtagcccggtccgaatttaaaaatccctgcaccgaatcggtcgtgcagggattttctgattttgtttcggaaacttcggattttccgggacggcgggacggcttgtcgtctgaattaccgccgcatgccgggcatcttcggcatcttcataccgcctccggccacggccttcatcatcttgcgggtgtcctcgaactgcttcatcagacggttcacgtcggccatcgtcgtgccgctgcctttagcgatgcgttcgcggcggcgggcattgatgatttcggggcgttcgcgctcggcgggggtcatcgacgagatgatcgcctcggtctgcttgaagacgtcgtccggaatgtccacgttcttgagcatcttgcccatgccgggaagcatcgacgcaaggtctttcaggttgcccatcttcttgatctgctggatctggccgatgaagtcgttgaaattgaactggttcttgaccagcttctttttcagcttgcgggcctcctcctcgtcgaactgctcctgcgcgcgctccacgagcgacaccacgtcgcccatgcccagaatacggtcggccatacgttcggggtggaagacctgcagggcgtccatcttctcgccgctcgaaatgaatttcagcggtttgttgacgaccgaacggatcgagatcgcggcgccgccgcgggtgtcgccgtcgagtttggtgagcaccacgccgtcgaagtcgagccggtcgttgaactcccgtgccgtgttcacggcgtcctgacccgtcatggcgtccacgacgaagagcgtttccgagggtttcacggcggttttgatggccgtgatctcctgcatcatcgcctcgtctacggccagacgtccggcggtatcgacgatcacgacgttgaacgcgtgctggcgtgcgtattttatggcgttttcggcgatctgcaccgggtctttgctgccctcttcggtatatacctcgacgccgatctgccctccgagcaccttcagctggtcgatggctgccggacggtaaacgtcgccggcgaccagcagtacctgccggcctttcttgctcttgatgaacgaagccagcttgcctgagaaagtggttttacccgaaccctgaagacccgcgatcagaatcacggcgggattgccctccagccggatgtccgtcgccgtgccgcccatcaacagggccagctcgtcgcgtacgatcttggtcatcatctggccgggcttcaccgccttcaatacgtcctgccccagcgccttctgcttcacttcgtcggtgaacgacttggctaccttgtagttgacgtcggcgtcgatcagcgcacggcgaatctccttgagggtttcggcgatgttgatctccgtgatgcggccctcgcctttgaggattttgaacgaccgttcgagtttatccgttaaattttcaaacataggtctgcgaaattttgcccacaaagataacgaataattcacaaagagcaagggccgcggcaattttcggcgccgctgccgccgccgaccgcacttttcggcgtaaatgtttggcagtccggcctattgtgctacctttgtgaccgaagcaaactatgcattatgaaaaaaacagcttttgcggtactcctcgcgcttctgtgttgcgtcagcggggcggcccagactcccgacgaatggcagcccccgaagggcctgccctacggcaacgaaatcggcatccgctacggcgcccagatccagctcggcaacggcggccggctttcgcccgacctgcaggcgttcagcatcgactatgcccgctacaactactacaacatcggcttccgcacgggtctgaacgtctttctggactccgacgtcttcgactactattccatcccgatgcagtttacatggcggacgggacgtatggtgtcggcatggcgcagaagcagggacgaaggctatccgaacaacgacccttatggcaacgattattacgggtattacggggagagcaaacccgactggggcagtgcgttcctcaccacgctgttctcgattctcccctcggcgttcgaagtgcatacgggtttcacaccgggcatgatgttcgggccgctgagccttccgccctatgacgggggatttctcgtcagacaccgcttcagctgtactttcgatgtcggcgcgcggctgattattcccatctggcggttcaatctctacggagatttcacctaccattgttatattacggataatttcggattccgatacggagacttccgtccgacccgctcctatatgggcgtcggcgtcggcctgtcgttcaacttctgaccggattgccgggtcgccgcaatccggttgcccagccgtcgcagcccggttgccccagccggtcgcttaccgcagcagtccggcttcgtaataaattacgatctgttcgatcatccggtcttcgttctgcttgtcgtattccgacttgaggttctgtccgaagatgcgcgacacgccctgccagaatcccgccacgaagccgccccggaactccttcagcacctcgtaggcggtgtattccgtttcgcggtcgatcagtttcagcaacactttgccctgcgtgcgggtcatgtgcttcagcaccggcgtatactcctccttgatttggttgtaaacctgtctgatataggctttctgcgccttcttcgtcggcaggcggcacaactcctcctccatggccgccatcttggctttggcgatccgggcgatggggtagaccttcttcacggcatcgaccagcttgcggtagcggcgcaggtccaccgggcggctaaatacgtaaaccggaagaatgtgcaccagcggcacggagtcgcccttttccacgcaccactcctgatgccagaagccgcggcctccctgcgcctgcgctccggggagtgcggcggccagcgttatcagaagcagaagccactttttcatgtccgtaaaaaattgttacctttgcgaaggtaattatttatcggttaaacgtcatacgccagaacgatattatgctcgaaaaaggattgtcggcccagagccgcactacggtaacgaacgaaaatacggccgccgcgatgggatcgggcgacctgcccgtattcgccacgccttcgatggtggcgctgatggaaaacgccgccatgacagccgcggcggccgcattgcctgccggctcgacgaccgtgggcgcggagatgaacgtcacccatatcaaaccttcggggctgggcgccgaaatcaccgcgacggccgtgctgaccgaagtcgagggacgcaagctgactttcaacgtcggcgcgcgcgacgccggggggatgatcggcgagggcgtgcatatccgctatgtcgtggactgcgagaagttcatggccaaactgggctgaccgtggaccgaccaagtgccgaacctcggcgccgcagccgcttccgtctgtggtgcggacgtctctggtacacctgcctgcgttacgggttgtggtacttcggcggcctgcgtttcgcccgtaaatccggctctccgagctgcgactattcgcacttccggcaccggacgcccttgctgcgcaggctgaaggacgtcgacatgcagtaccaatacaacaagatcaccaatctccggctggccgcggcgcgtctcgacggcgtggtgctgcgtccgggcgagacgttcagctattggcggctgatcggacgtccctcccgccgcaagggctatctcgacggcatcgttcttttctgcggcacgttccgccccggagtcggcggcggactctgccagatgtccaacctgatcttctggatgacgctccatacgccgctgaccgttgtcgagcgttaccgccattcgtacgacgtatttcccgactgcggccgcaccagcctttcggaagcggcgcgacctgcgtttatccctaccgcgacctgatgatccgcaacgatacgcagacgactttccgcctgcatgtcaccgtaggcggcgagttcctcgaaggggagtggcgcgccgaccggcggccggaatactcctaccgcgtggtcgaacgggatcactgcatgcagagcgaatactggggcggatacagccgccacaacaagctctaccgcgaggtgtacgacgccgaaggccgctgcgtcgatgtgcagtacgtcacccgcaacgacgcgctgatgatgtattcgccgttccttgcggagaacgctcagcccggaaaacggccggccgacaatcagcggcccggctatgaataaccgcctgtaaatgaaaagggcgcaggggaaaatcctccgcgccctttttcacatcgctcctctccggtcatagcccgatcagcaggtgttcgagcaggatgaccagaatgcccgacagatagccgacgaacgccagcagcgtgattttcttgaagtaccacgcgaagttgatcttttccagccccatcgccacgacgcccgccgccgaaccgataatcagcagactgccgcccacgcctgcgcagtaggtcagcaggtgccagaacagtccgtcctgcacgaacgactgcatgtaggccggatcggcgctggccgcaaccgccgccgcgtccatgaccggatacatgcccatacatgcggccaccagcggtacgttgtcgatgaccgacgaaagcacgccgatgacgcccgcgatcgtgaagacctcgtgcacctgcttgtcgagccagttggccacgtcggtcagcacgcccgcgctctgcagtgcggccaccgacatcaggatgccgaggaagaagagaatcgtcggcatgtcgatatgcttgagcactttcgaaacgcggcatttgatcgactcctcgatgccgcgtttgcggtcgtagatgatctccgtcagcacccacatcacgcccagcgaaaccatcatgcccatgtagggcggcaggtgggtgatgctcttgaatacgggtacgaacagcaggctgaggacgcccgtgacgaggatgaacttgctcagccgcggacccacgcccttgggcagctccgcttcgaacgcgctttcgtccacgggggccgcgtcttcgttgcccacgtagcgcatcgcgatcgccgtcgggatgattaccgatacgatgcacggcacgaagagcgttcccatcagggccgccgcagtgacgttgccgcgcatccagagcatgatcgtcgtcacgtcgccgatgggcgaccatgcgccgccgctgttggccgcgatgacgatcaggctggcgaaaatccagcgctccttctgatccgcaatgattcgccgcagcagcattaccatgatgatcgtcgtggtcatgttgtccagcgccgccgacatgaaaaacgtgatgatggccagcagccacatcagcttgtgcttgttgcgggtggtaatgtggtcggtgatgacgttgaagccgccgtgcgtgtcgatcagatcgacgatggtcatggctccgatcaggaaaaccaagatttcgcacgtgtcgcccagatggtctaccatctcgtggctgatgttgctgtcgtgtccccacaggctgaaaaccgtccatatcgcgccgcacataagcagtgcgatggccgatttgtccacttttaccttatgctccagcgcgatgaacgtgtaacccaccacgaagagcagaatcattgtcagaatcatgctttatgtgttaaaaatcatattctccggcgcggaagaccttgatctccccggtcggctgccggttcatcagcacctgcgccgcaataagcgagccgctgtccgtccggtagcagatgacctgagccgcgggctggtagctgcggggcagattctgcagtaccgcaaagttgccgcattcgatcgccgactgcactttgggcagatcgtgcgcctcgaaggagtattccgagcggtagagccgctcgcggctccgcttctcgaccggggccgacgaatcgccgaacagccggtagcagatcatcacgatgcccgtgcaaaggatgcaggagctgatcaaaaggttccactgtgacagcatgtcgttctcggtaaagagactggcatgggagttggcccacagcagggtgatgctgcctgccgtcagcacgatgcctaatgacgggttgtaacggcggcatgcaatttcgggcgatgcggaataaatcgcatcatcgatcatatttttcattgatgagttttcgtttggtgaaagattcgtgaaagtattgtccgcatgtaggagcgtgcggttcgaacgtgaatcctccgctaaatgatgatcctcctcaaataataaatataccgatcggccctgcgtatgctgggcgggcgtacgccgcattttccgacagccggtgcggccgggtgcggattgcctgcgcaggcgtacccgcgggtccccgccacgatgaaattctccgcgtggcggacgcttcgtcctgcgccctgttccgctcccgaaagctgggtgcagcccgtgcaggcggtagccagcaggggtgcgttgtcggtctcgaaacgttcgctgtcggcctgcgagagaacggcggcggtgatttcggtccggagcgtacgggactgactctccccggcggcgtttaccgtcgccgccgcccagcacaaagccaatatcatcaaccactgtttcatccttgcaaaagtaataaaattataccgactatgcaccttgatttgcagcatttttcgcttccggaattgtattttgggaaaatttgcttatctttgtgccgctttcgagcaacggattgagctgtggtgtaatggtaacacagcagattttggttctgtcgttccaggttcgagtcctggcagctcaactcacacaaagggagactttcgaggtctcccttttgtgttatcgcgctgtccatcagctgtctacaccagtccggcacggcttttgccggagggttccggcgtcatttcccggatttctccggctccggattttcgtcgtccgttccgccgcactgcgtcgcattgtcgagcatgccggtcaacagttccatcgtttcgatattttccgcctctgcggtgtcggtcttgtcggttttcagtgtgtccatgatcgaatgatttaggtttatcggattttcttgcgcgttatgacggcggcgatccacaacagcgcgacggcgccgatgaccgaagtcgccagactgccgagcgaacctatcggcgcaggtcctacgggcgagaagagccagcctcccagcacgccgccgacgagtcctacgataaggttgatgatgagccctgagccgtcgcccttgacgatgaggttggcgatccatccggacgccagacctagcaggaggtaccagacaaaatacatagatttccagttttgatcttatgtacctgccgcgtgcaaaattcgttcccgatgttgcgccggggcgctaaagcgcctgtttcagcgcttttgccaactggtcggggcacgacgtgcccttgccgcggcagtcgatgccttcgagccgcgcgacggcatctgcggctttcatgccgcgtacgagcgcggcgatgccctgcgtgtttccggaacagccgcccgtgaaggttacgctgcggataacgccctcttccagttcgatgtcgatttgccgggaacaggtcccgacggtgggataggatatgtgctgggtcatggtgtctgatatgaaaattcgaccgcaaatatagcaataaacggcgaaacgggaaatcttttctgaatgtaggggaggtgctttcgcggccgcggctgttgcgggaatgcgccgacctgtcgacctgcggatcgtctggctggctggctggctggcgcttgaccggtggatcggcggccgaagggccgaagatcggcgtgtctctttgtgtgaagggcctaaaaaaacattgccgaaaagggggtaatctgtaagaggcgcttaaaagattccccccccctcgacaatgttattgggatcgtgcccggattgctccggttgctggtgcaaatatagggataaattcctaaccgacaaacaaaaaagctgcaaaatttgcagctttttctgttttcgcgtattctgtttactgacgctggaggtcgctgttgtcggctaccaccatgttcttgtcgatgcgcagcgttacgttgccgtccacttcgatcagcagggtggtctccttgatctcctttaccgtgccgtagataccgccggcggtgatgaccttgtcgccctttttcagcccgtcgcggaaagcctgcatctgcttgcggcgcttggcttcgggacgccacatgaagagccataaaaccagcaccatgaggccgatcataatgatgaaactgtactgctgcatgaaacccggctggggttctacgggcggcacctgaagaaaattgatcatacgtcgttatgttttagtgtttaatttctgtaacgggacaaatatacgaaatattgtcgaatacgcaactatttattccacttcggcttcgataaacagccggaggggactgcgtgccccggcgaacgagacgtcgagcgtcttgagctgccagccccattcgccccttgcgtcgaaagtgagcgtcacctgctgcgcatcgccggcgttaatcggctgattgtcatattcgagcgtcgtgcatccgcagctgcggccgtatttggcgatgacgaccggtccgcttgtctcgttggccagccacagacgcagctgggcgatttcgcccgaatgcaggcgtccgaaacgcacggtgtccgtacctcccgtgtcgagaatcttgtccgtgagggtgataatccggcctttgcgttcggtcttcacctgccgggcgccgcatgccgcgagcgacgcggccagaagcagcaacagacagacacgcagcatcggacctcagatcaggccgcggcccgctttcttgatgcggccttcggcggtgagcgaatcgacgatcttgtccagcacgccgttgatgaaagtgctgctgccgggtgtcgagtagtatttcgaaatctcgatgtactcgtcgagcgtcaccttgaccggaatcgacgggaacgaggtcagttcggccatcgccgtgccgatgatgaggttgtccatgaagacgatgcgctccacgtcccagttggaggtgaatttctcgatataatcctgataggagtcgtaattgacgagcgatttttcgaacagcgtccggacgaactgcgggtcctcgtcgctcttgaatttcgcgggaaccttcagctccgtgtgcgtcgggcgcaggttcgagagcgaacgcaggatcatcatcacgatatagggcaggtcgtcgctccagaggatcgacatctcctccagcacgttgtccagcggttcgcagctctgaagctccttgaagaagtcttcgagcagtttgcggtcgtcggcgaacgaacgctccggacgcgccatgtaatccttgaagtagtcgctttcggtcagctgggtgtagagcgtgcgtatcaactccggataccgcgtccagttcagcttgcgggccgccgcatagtcgttcaccgcgtcgctgttggcgattacgcggatgatctggttgtcgacgaatttggtgttggggttgaggtcttcgtgtgtcggcagttttttctgcttggccagctcctgacgctgttcggcgtaacgggcgatttccacgggcaggatcagtatctggaagtagaggtcgtaggccttgtcgacggacgtcatcagcgttttctcggacgcaatcatgttgtctgcacccgatttgaggtgcgcgaacagcgctttgacgaccttaatacgaagtaatcttctgctcaacatatcttttagaacggttttaacggccgcaaagatagaaaaatttttccgtaaagaaagaattattgcctatctttgcggtcgtatggagcaattggaagaaaaagagatcataccgtacgacgtcatcgtcgtcggtgcgggggctgcgggcatgatggccgcaggaaccgccgcgcgcaacggaaaacgtgtgctgctcatcgagaagatggagaaatcgggccgtaaggtccgcatcacgggcaagggccgctgcaacgtcaccaacgcccgccctgccgaggagttcgcctcgcaggtgcggatcaatgcggagtttttcgcgccggccttcgccgagttcaacaaccgcgccgccatccgcttcttcgagagggcgggcgtgaagctcgaaatcgagcgcggcgaacgggtctttcccaaaagcggcaaggcgtgggacatcgctacggccctgttggaatattgcttcgagaacggcgtcaaaatcatatacaatacgcgcgtcaccgggattatgaccttgggcagcaaggtcttcggcgtccgctatatcaacaagcgcggtttcgaacgcaaggaggagtgcccgaacgtcatcgtcgctacgggagggctttcctatcccgcgacgggttccacgggcgacggatacgccttcgcatccgacttggggcactccgtagagccggtgcgcccttcgctgacgccgctcgtctcgtcgcatccgcagatcaaatacctcgacggccttctgctgcgcaacgtccgggcgacgctttggatcgacgaccagcccgtgcgcgaggagttcggcgaactgggattctcgcagcgcggcatcgagggcgccgtggcgctgcggatgagccgcgacgcggtggatgcgctgatcgaccagcggcgcgtgaaactggtcgtggacctcaaacccgcgcttaccgaagaggtgttgcgcgagcggatcgcgcgcgagatcgccgatatggagccgaccgagtttttcaccgaactgctgcgtaagctggttccgaagccgctcgtcttgactcttgtgcatgaaatggacgtcaacggcaagaattacgtcagcaaaatcaccgaagagcagatcggccgcctgataaagacgctcaagggattcaccttcccgcttacggattatgcgccgttcgaatatgccgtcgttacggccggcggcgtctgctgcgacgaggtgaacccctatacgatggagtcgctgaaggtccggggactttactttgcgggcgaggtgctggacctcgacgccaatacgggcggatacaacctgcagatcgccttttcgacaggccgtctggcgggcatgctgaaaaaataggggagatgaggatcggcggccgcactatcggactgggtttttacggacggatcgcagaactgcacaaccgacttgtccgcgcccgttattttcgggggcacggagtccattcgcccttcgtatataatattgtacgggaggtcttcatgcgcggcgagctgctgccgggcgaccggcggctgtaccgggcgctgcgcggtgccggagtgcccgaacgccgggcgatacagttgcaaaacgtggcgattcattgcggttacggtacgtttggcctgaatcgtgcggatgccgaattctgtatcctgacgcgggacctgccccgtgcggagacgctggcgttggtcgccgccgcgggcgaagcggggcataccgtcgccctgatgtcgccctgcgagggacaggatcgccagatgttgtgccgtcagatcgtggcggcgcatcgttcgacgacggtggacaataggggatacctgctgattttcaataataatttgccgaaacaacatttccggatatgaaaatatacaccaaaacgggcgacaaggggaccacgtctctggtcggcggcgagcgggttttcaagaccgacgaacgggtcgaagcatacggctcggtagatgaattggcggcttttacggcgttgttgtgcgacaatatgcgctccgatgccgcactgacgccgtatgtggacgacctgaaccgcatcctttcgcggctgatgaccgtcgaagccctgctggcccgcgggaaatcgggctgcgagaaggtcgctccgctggcgcccgaagccgtcacgtggctcgaagggcggatcgatgccttgcaggctgccgtaccgccgatcgacaagtttacgattcccggcggcaacgccgtcgtttcgatgtgccatgtctgccgcacggtttgccgccgcgccgaacgcgccgcactgcgcgccgacgagaaatacggcacggacgccgaggcgctgatgttcctgaaccggctgtcggattacttttatgcgctcggacgcatgcttacggcgcattacgaggtcgatgaaaccttgtggattccgtaattcgttgattgcaagcgtgtttatcctgcaccggcgatgttttgttgttttttctttgtttttctcgttttttttatacttttgcaaatcagtgatggcggaacagtcccgtttttggtttggctaatccgctgatatttgggaacttaaaaacattgaatttatgtactggacacttgaattggcatcgaaactcgaagatgccccttggcctgccacgaaagacgaactgatcgactatgcagtacgttcgggtgcacctcttgaagtgcttgaaaatctgcaagaaatagaagacgaaggcgagatatacgaatctatcgaagacatctggcccgattacccctcgaaagacgatttcttcttcaacgaggaagagtactgaaaagaattttgggctgaaatagctcaaaatgatatagttaaattactcgacggcacgattcataatcgtgccgttagtatttaagggacatttccggttaaataaaattgacaaaaaattgacaatttttggattcatctttgtgatggtaaaaaatcggaaattatgggtagacttaaatcagaatgtccctctggcaactttattgtgcgcaccaagccgaacgcaaaaggggaagttgcatcccgtttcattctaatttttaagcatactcttgttgctatggagtaatacttatttctgagacgtaagaacgacggccaatgtccgcccggtcggggatcgtctgctatgacgcgaatttgctcggctgtagacgaataaaacggccgctcccgaaagaagcggccgttctgtttgctgtccgatcccgtttactgaacgatcgagatcgtggggttgatattgttttgtacggatatgcggtgcgtaccgccgttgggagcggctaaggctccctttccgctggcctgccagttggccatgcaacggagccggatcagaatatccccgttattgatggcatgctcgaacgtcatgttgcggtcgatcaggcaatggtccgtattcatcatttcataattgtaagagaacgtctgcgcctgatcgccctctccgacggtcgtcgtctgcaagggcgctccgggcttccattcgccgccgtcgtagtactccagcatccagtatttcataccggttccggatgcgcgtgcgtggaacttggcgttgatgaccgttccggcctttatggtcatttccggaatggtgaacagccaccagtcgcccggccatccgcccgtgatataaggctcgccggccgtattggcgcgggctatcttgttgtttacgtcgagtgctggatcgcagttgctgatatagctgatatagccctttccggttgccgacggcattttgttgtccacgacgaactcatcgacgttgacgccctttgtaaatacccattgcgccggcagattcgaaggaatttcccgtacgatcgtcttctcgtagacgccgccgaacggatccgttacgacgaccttgatcgtcgagccgggaacctgcgctatggcggagaacatatgggcattgtagcccgtgaggtaggtgctgttgggcgatccgggggcgtgggccggttccagtacgtctttctgccatgtgtagtgcgtcgggtccttgcggtatacgcgggtcgctgtgagcggctgtccgttttcggtcacggataccgtccagtcttcgtcccagttccagacattgaccagcacttcgttggccttggcgcccacggcgctcttgtagtcgctcttcacgaaattcatgtcgtatacggcgaactgctcgttgcgggccacctcgatccccttatagtaccactgcacggccgttccgttgaatttgaatacgccgtatcccgtcggggagccgtccttgcacaagtcgtagtcggcgcctccgttggcgcttttcacgttgaaccaccacgtgccgcatacggctgcgacgttatgttcgcgtacgccttcggcgatcttcgcgtggtgattggtgtgcgtatgtccggtgaggaattccacctgataaccctgcagcagaccgagcaggtcgtttccgcccgaaagcgtcacgatcgggttcagaccggccgaggtcatcggggcatgcatggcgaccacgatcttcttggacttgtccacgtatttcaggtcttcggccacccacgccatctgccatttctgcgggtcggagtcgccgagcagaccgatccgctcgatgcggctgccgccgttgtaattgtcgtactggtcgttgtccagaacgatgtagtgtacgtcgccgatgttgaacgaatagtaggtgggggctatgtgctgcttgaaaggcagttccgtgaaatagtctccgactaccttcggatcgttgtcgtggttgccgatcacgttgaaaaccgggcaggggaagttcttcatcaagtccttgtagttcggcagctggtagcgtacctccaccatgttctcaggaccctgattcatggttttgtaccagaacgcatcccacgtgatgtcgcccagacagagcgcatacacgttcgcatactgcgccatttcggccgtgatgtcgggcatgaacttgttcttgtactggtcgatgtcggcatatttgcctgccgtgttcggggtcttgctcgccagatgaaggtcggtgaataccatcatcacatggttcgtgtttccgccggggatctccgtaagcgcgaaatcgtgctgctcgttgtcttcgttgagcagctgctggctcatggccgggaaggccggataacccgcttcgctctcgatgttgtatccggaggggatggaaacgaatacgtaccccattttcttctccgagggcaggtaatagacgccgtccttgtcggtcttggtgacgatgactccgtcggacaccaccacgtctgcgaccgcctttttcccgcagtagacgcggcccttgacggtcatgcccgcctgatcgggaatcgcggggaagtgcgccttgtagatggtcatcggacccagcacctgctgcttgttgtaacgcttcaggataagctcgtacgagcgcaggtcgatcgttttgggaacggttattatgacgtaatcctcggccacctcgctgatctcggcctgaaaatatttggtctcctcggcagggtcttccgacgtggagcggaacaggaatacgtcgtatttgtcgaatccggttcccatgatcttgatggggtcctccgggatgaagatctcctccgcatcgggcatcacgagatcttcgatgaagacggcggggataatttcctcctgttcgggcgtcggtttggtccatgtcggatcttccgaacagctgattccgatgcacaacagcagaaatgcggctgcgaacagatacggtaatctgaattttatcaatcgtttcatttttctcattgtttagatttttgtctaatcctgccgaatcgctccgggaggggagcggttcggcaagattatcctgcgttacaccggattaattgacttttttcttcaggctcgtatagatcatgcggttcgtacccgtcgcgctgttggctgccttgccgtccacgcgctcgtcggaattgacgcggaaccgcagccagagcgaagactggttcttgcaaccgtcgggcagtttgaaggcgaagttcttgggaccgggtattacctcccagtttccggccttgtagtcggttacgaaggtccacggaccggcctcggccgcagcccactcgatcgagaagggaccgggacccgactgcgagctggtggtgcagaagcatacgtaaaggtcatccgaaatgcctgccgtcgaagtctcgaagtaccatgccttctgggtcggcgtataggtgtcgttcgactgggcgccccagccgccgcagttggcggaatagtatcccttctcggtgccgttgaccgacgcatcgacacggacataggcggcgccgctgtaaaggcggaaggtggtgctctgcgcgatgacggccttgggggcgaagttcacgaacagctgtcccgtgccgactttgggaacgagtatctccttgtcgggaagcgtttcgggccagtagaattcggtgacgggcacgtaacgccgggcttcggtcagcttgtcgcggtcgttgatgttgcgcatcctgatcgcccattcgttttcgaccttgatcagaatacccgttatatccagcatcggatcgtcagtcagcagttcgtaatgtttgaacatggcgcccgtctcgacgctcgtgccgccgtagacgtagtggctgatcgtgttgccgtcgcggtccagaagcaactgggcgaggtcggtaggacgtccgccgccgtaaatggagccttcgttggcgttgtagtaggttccgtgcgggaatacgaactggagatttctgatcgttaccagcgtaccgagcatttcgtccgtcaggccctgcgtgctttccatcaccttcggttcgatcggagcgccgcccgtggtgatgacgtcgcggatgcgttcggtcgaaatggtgatgtagggctgtccgtcgtcgtcgatcaccgactgcgtattcatgagcggtatggtcaccagcgaattgagctggagcgagtgcgagccttcctgaacgcggaactgaatggcgcgtccgctggcgtcctgaacgaagaacgcggcgggattcgggcagttgccggatacgcggtcgctgatcacggtgccctgtatcttgacgttctcacgaacggttccctgcaggccgcccagcttctcgtacacctcggcaatggtcttgagttcggcgttttcgccgatatccagcggaatgctctggtagacgatcagctctaccgtcgtcatacgctcggtggtggcgttgaattcgatacgtcccgtgcggggcaccgttcccgcatatttgggaacggagaacttgatttcgttgtcgctgatctcgtcgatcgtgatccagccctcgccggagtcgccgaccttggccgtccactccacgttgcaggtgacgcctaccgaatatttctcctcgccgttgctgttgatgaccaccttgggaggcgtcgtggtcactccgagtttgagcgccggatcgacgtcccgctgcgaaatcgtgatttcctgaatgatgttgtcgtgctcgtgcttgccaacgacgcggaagcgggcctcccgcagtacggggtccttggccggctgtttggataccttcacggcgaaaacgccgtcgtcggaaccctccttgggccagatattgacccacgtctgggaggtgtccgccatttcgaccttccagtcgatattggaatacacggtgaaactgtgcgtctctcccgctgcgttgtacaggaaagcgtcttccgacagcgtgatatggggatcctggacaacgtcggtctcgtcgtccttgcaggcgacgaatgccgttgccgccatcgcgcagagagcgagcgccttcaggccgggccatcttccggagatgaattgttttattttcatatgaattgttttttcgttatttacgggttaaattcaaaactcgaccgggatgctgcgttgcctttccggttgcgattcgttttacggacactcttaccatttgatgtccgcatcccatttgtggccggtgtaaccgaggttgttgtcctcctccggattctccagtttgacggccttgcggctccaccacaccggcgttttcatgttgtcttcgcccattttggccagctgggtcgcatagttcttgttggacgaacgcagcaccagcgggtaggggaaacgggtcggatgcacgccgtcgttgcggatggcttcgcccatcaccagcaggggataacccgtccggcggtactcgtgccaagactcgtagcccaccgtgaacagcgaaacgtatttctgggttatgatgatttcggtcgtagcgtcgtaagccacggctccgttctgcaggaaggtttcgacggccgattctgagatgtcgggaatccactgcttgagcgacgccgtgaccgcagcatagtaggtctccgatgcttcgccgtccatcattccgcgctgaatggcctcggccttgatgaacagcacctccgaataggtcatgaacgtgtacggggaggtgtactgcctgaaagtcgtattgttgctgttggacgcgccgtcggccgactgtttggagatgaccgaagccggggcgccgctcgtgattcccacgtaaccgcccgcgttggctccggagcttacgcggttgcagtaaaccgagatgcgggggtcgcttgagtccaccatgatgttgatgaaacgttcgcccatcgcgctgtcgtcggtggcgttgtcgccgaaatcattgacgaacggacgcgtgccgctgtatttcagcgtggcgttgtcgtcgttgctctcgaatatggggtactgcgaggggttctcgaatacggtcttgatgcgttccgccgaattcatgtccctgcggttgctcacgcgcatcagcaggcgcagatagagcgagttggtgaacttccgccatttggtcacgtcgccgttgtagagcaggtcgcgcttggcgtctatggtcgaggtcttcgtgtaaagcgtgttggcccgttcgaggtccatcagcagcgagtcgtagatgactttctgatcgtcgaatttcggctgcatgatgttttcgtcgatgcctttgaacgcctccttgaagggcatgtcgccgaacaggtcggtcatgttcgaaaggtagagcgccttcatggtcagggctatggcctgcgcgttggtattctcctccttctccgcgagcttatacatctctatggcattgacggcccagcgtccgcagaagttccacgcgcccttgaattcgctgtcggtgagcacgaagcggtgcagctgattcagcgtgctggtctccaccgtatactgcatgaactcgttgttgtggcgccacgtgcggtatttcatgcttccggcgccctcgaaaatcaggtcttcgagcatctgggaggagttggccttgccgacctccgcccggttggggtccttgttgtaatcgtcgaaattgctcgtacagccgcacaatcccaagattatcactcccccggtcaatatatatgaattgattcgtttcatcgtcttattagaattgaagtttaagattaacgccatacgtgcgtgtcatcgggaacgccgcggtttcgaaacccttggtgatttccgaaccgttcatcgtcgcgatctccgggtcgaactgcggccagttggtccagcagaagaggttcgtggcgaagaaggcgatcgaagcgccctgcagcaccttggtcttggccgcgatcttcttgggaagcgaatattcgagacgtatgtccttcatcttcaggaacgacgtgctgaaggtgttgttcaccacgttgtcgcggttgaacacgcgcaggttgtagtagctctcgatgctggccgtcacggtcttgttgatcgagtaggtgccgtcggcgttctggttcacgcccttgtggatcagaccgtcataacggccgggaagcgtcgcttttatcttaccctgatagcccagcatggcgttggtgaaggagtaggcctgcccgccccattgcgccgagaacgagaagctcaggcggaaattcttgtaggagatcgagttcatccagcccgccttccagtcggcctgcgtgttgccgaggttctcgaattccgaagccagtacgggataaccgtccgaatcgacgatgtcccagcccgatacgtcgatcgtcgatccgtcgtcggccgtgacgtaggaacccttgggggccttctcgtagcccgaaccgtacaggtcgcccagcgatccgcccggaacggcgcggatttcgccgcggggaccggttgcgatggtccaagaatccagattcggggccagctccacgaccttgttgcggttgcgcgaccacgtgaagttcatgtcccagcggatgttcttgttcctcacgggctgtatgcgggccgatacctcccagccgcggttgttgatttcgcccgcgttcacgatcgtattgtagacgccggtggtgatgtctacgggcaccgaaatgatctggttcgtggtggtcgcgttgtagaacgccacgtcgaacgtcagacggctgtcgaagaagcggccctcgacgccgaactcccagctctcgacgttttcgggtttgaggttgtagttcgccttgttggtcggcatgttgaaaccgccggtgaaggaggagttgttgtagtagttgagcagctgatagggcgacgtgtcgttacccacgttggcccacgaagcccgcaccttgaggaaattgaccatcggggtgtcgatgtgcagcaggtcgctgagaatgacgctgccgctgaccgaaggatagaaataggagttgttgcccggagccagcgtactcgaccagtcgttgcggccggtgacgtcgaggaatatcatgttgcgccagctggccgatatgagtccgtagaagctgttgatcgacttctgacggcgtatggaagtcactttgggacggtccaccgagttgctcaggcggtagtcgcggtccacgaccagactttcggccagcgaggtgttcgaacggtaggactgcatcatgttgttgccgccgaacgatgcgctcaggtcgaagtcgttcagtttcttggtatagcgcagcaggaagtcgttgttcatctcgtagtcgaacacggtctgctccttgtacataccgttgatgtaggtcttggcgcccttgggtttctgctgggtgcggaaatcgttgttgaggtccatgccgcatcgcaggatcagcgaaagctcttcggtgaagttgatcgtcgctgccagattgccgaacacgcggtcgcggtcgagtttgttgagctgttcgtaagccgtgtagtaggggttgttgccgttggccgatacgtgctgggtgcttttgctcaggtcaccgccttcgcgcacccatttcttgtagtccgccttgaaccactgggcgtccacgttgggcgtattccacagcagcggatacatgatcgacgagccgccgtaaccggtcatcggcaggttgtcgctgtccttgcggtagtagttcaccttggcgtccagcttgatgtacttgttgatctgctgcgagagcgatatcgagaaggtctgctgtttgtaaccggtgttgggaacgatccagtcgttgcgcacgtcggttaccgaaacccggaccgaggtgcctttgccgttgttgccgctgaccgagatgttgttgttccacgttacgccggtgtcgaagaatcccgcgaagaagttgcgcggacgccactccatcatcgtataggtgccgtcgtcgttcagcgaaggccactcgtaggtcagatggccgtcgaacttgtcgccgaaggcataggacgaccagttgcgcgacacgccgtctacgctgtagaacgaataggggttgccgccgaagcgtcctgcgccgtattcgtactggaaatcgggccagaatccggctttctcgaacgaaaccgacgagctgaacgtaacgcctatgcctttggtggtgcgacccgacttggtcgtgatgatgatggcgccgtttgcggcgcgcgatccgtacaatgccgttgcggcgggacctttcagtacggatacgttctcgatgtcttcggggttgatgtcgcccgcggcgttaccgaagtctacggcgccgtcggtcgagttgtatgcgctttccgacgtgctggaagtggtgctgctggtgatgggcactccgtcgaccacgaacagggccgtgccgccgttcatgttgatggaggtttcgccgcggagagtcacgcgcatcgatcctccgggacccgtcgacgcctgatcgaagttcagaccggcgaccttgcctgacagagcattcatccagttgctcgataccgtgctggtgagcacatcgttgtccaccttcgtaacggcataaccgagcgctttttcgtctcgcttgataccgagtgcggttacgacgacgccttcgatttcctgactgtcggcctccagcgtgacgtctatccgcgttttagggcctattagtatcttctgggtcttataacccagcgaagaaaaaacgagggtctgagtttcccccccccttattttgtacttgccgttgatgtccgtgataacacctgtcggtgttccctcgatcgttacggcgcagcctaccgccggggtagtgccgtccgaatcgtagacggttcctgtgatatccgctttcttctgggcgtagagcatcgtcgatgccagcaccagaaacagggataacaaaaacctcttaacgtagaatttaaaattcataagcatttgtttttggttaaatgtttaagttgtttgaatgttgtcggttaaataaatataggtatggtcgccaatggctctgtatggtgcgggaagcgccggaagcgatcagcggattcgagattcgattcggttttttccggcagggaatgctgccggtgcggtccgaaaccgcgttgcctgcggttgtcgcaggggcgtggaaccggcattttgctgcgggtacaggtgccgtcgcatcggcggcggccattgctgttgttcttattccggcaggttccggaatccggtttggcggcagtttcgatttcatggtcagttgtttaggcggcggtccatatcagcgttcattttccgctcccgaagcgacttgttaatttcaatatgaaaataatacctttcgtttcaaaacaaaaatacgaattagtttttactgtgcaaaatatttcgtattttttttagtttacaaaacgaaaaatatcctgttacggaggtttcgtgtaataagggcgttgttccgggcggaaaaacggctgcttttttattattcacctcgctggatttcaaatatttgtcaaatgtcgccccgcagttgaccgctgcggccgctgatttcggcggcgcagcctgcatgtcgaatgtaggtccgggacaatatgacaagggccgccccgcagtggggcagcccttggtttttatcagatgattccgtctatttttccgccacgaagaacagatcgaaactctcgtccgtcacggggccgatccggtagtcgtccatgcggatcgaggtcgtgagatcggtgttggacttcaggagtctacggcggtttatgcggttgagaacgtcgtaggggaattgcagcagacagcgggggagccggtgctgcaggtcgaggatgtcgaagcgcgtgatgcgcttcacgctgcggcggttctgttcgtaatattccatgacccgcgcgttgcccgaaacgccgagcgcctcgaccgacgaaaattcgctgccgagcaggctgcgcagctccgcggcggtgtattcccggatatgccacgggttgcgcgtgagcgacatcggggcgttcggggttgtcacgatgaactttccgcccggacgcagcacgcgtttcacttcgcgcaccagttcgaggtcccgttttatgtgttcgatcacctgaaacgagatcacgaagtcgaaactgtcgtttgcgaagggcagcggcggaactgtcgcctgccggaattcgacgttcgggagctgcgtcggttcgggcgcgggggccagtttgtcgatggtgacgaaactccgggcgcggggcgccacgacctcgatgccgtaaccggcccccgtgcctatctccagcacgtcgccgctgatgcgctgcgccgcggcatggtaggccagcagcgaacgctggaatacgaaattgtcggaagcttcgcgcgaaacccgttccgcggtcgttatcttggccattactcgttgatctttattccctgttcgtccaccgtgacggcgccgcgtttgagcagcatgcccagcgaacgtttgaaaaccttcttgctcgtctgcgtcagccggttcacctcttccggggcgctgtcgtcgttcagcggcaggaagccgccgttgtcgcggaccagctgcagcaaaacctccgccgagtccttcacctgcgcgaaaccctcctgctggaggctgacgtcgatgcggttgtcttcggtgagtttgcggacgtaacctttcgtccggtctccgaccgctatggggcggaacagctggttgcggtagagcatgccccagtgccggttgtttatgatcacgcggtagccgatcggactctccgaagccacgagcagatcgacttcctgacggggcgccaccgtgatgctgtcgttgttgatgaagctcttgagcttgcaggtcgccacgcagcggcccgtgacgctgtcttcgtagaggtagacgatgtagctccgtcctgcgatgatgccgccctgctggttgcggttcggaaggaagaggtctttgccgtacagcccccagtcgaggaacgccccgtgggccgtcttgtccacgacgcggagataacccgcctcgccgacgcgcagcagcggcgtttcggtcgtcgccaccagccggtcttcggagtcgtggtagaggaagacctccttttcgtcgcccggcttgtctgtaagggatatgtaacggttgggcagcagaacctcgttctgctcctcgtccgcaaggtataatccgtaatccgagatgcggcttacggtgagtttctggatgcgtcctgctctgagcatattgtcgtttgtcggaattgaccgactgcaaaagtacgtttaatttcgcggctgtgcaactttccgcgcgggaatagatcggacccgccgcttcgaatgaatccgattttccgccacggctttggctattgcggaaaaaagcgtacctttcggacactaaccgaaaactcccgaccatgaagctgcgcctattttccgcactcctgctcgcaggattgctcacggcggccgcggcctttgcccggcagcccgtcgatgaactgtacgacaaggccgaataccgtatcgcgatgcgcgacagcgtgaaactctataccgcggtctatacgcccaaaacggatgccaaagcccccatccttattttccgcaccccctacggctgcgctccctacggtcccggcgagtttccccgcggcttcggaagcggctatatgcgcagttatatcgaccgcggctatatcgtcgtcatgcaggatgtgcggggccgctttatgagcgagggcgagttcgtccatgtccgccctgcgggatacggcgaaacggacgagacgacggacagctacgatacggtcgagtggctcgtgaaacatgtgccgcacaacaacggcagggtaggtttcgccggcagttcctatccgggcttctacgccatgatgggcggtctctgcacccatcctgcggtgaaggccgtttcgccgcaggctcctgtcaccgattggttcatgggcgacgacgtccgccacaacggcgtgctgatgctcaccgactcctaccgtttcctgagcggcatgaacacccctccgggccatactccgaccgaaaagatgcccccgatgtcgaagcggacccgccccgacgagtggtcgttcttccgggaacatgcgacgctggccgaacttacggaacttcagcgtcccaatcctttctgggaagagcttgccgaacacccctcctacgacgcatggtggcaggcgcgcgacctgcgcagggcctgctacaacgtacagccggccgtgctggtcgtcggagggacgttcgacgccgaggattgtttcggggcgtggaacctctaccgggccatggtccggcaaagtcccgcaacgccgtgccatctggtcgtgggaccttgggcgcacggagcatggcgcaacggcagcggaaaactcggagcgttcgatttcgggcgcgaagcggcgtgggaatactatatggagcatttcgaactccctttcttcgaccattacctcaagggcgagggcgccgcggacccgcttcccgccgccgcggttttctcgtcgggcgacaaccgctggcatgctttcgaccgctggacgccgcgcgaagcgcgtaagctcaccttctacctctccgacggcggacgtctcgaaacccgccgcccgacggccaaaagctccgcctccgcctatacgtccgatccggccgatcccgtgccctatatcgaatccttcggcgaacgccgccccaaagagtatatgctcaccgaccagcgcttcgtgtcggaccgttccgacgtgctgaccttcgtcaccgagccgctcgacggggatatgaccctcgcgggacccgtcgatgtcgagctggaggtgatcctttcgaccaccgacgccgattttgtcgtcaggctgattgacgttttccccgacgacgatccgcagtccggctgccggatgctcgtgcgcggcgacgtgatgcgggggcgtttccgcgacgggttctcgcgtcccaaagcctttacgccgggcgttccggcccgcgtgccgttccgcatgaccgacatcgcgcatacgttccgcgccggacaccgggtgatgattcaggtgcagagcacatggttcccgctcgcggagcgcagcccccagcagttcgtcgatgtctggacgtgcggcgcttcggatttcgtgccctgcaaagtctcggtgctgcaccagcggagcaacgcttcgtccgttaccgtgtggcggcttgaagaaagctgatccggttcgccgctctgttccggcttacgccgcgccgcgtcggtatgcgcggatcgcatgaaatttgcgggatgtcttacaggatgtcccgcttttttcttgcaaaaagtgcaaactgtaagaaaatttcatatatttgttacaaaagagaagtttcctatgaaaatacgcgtagctatctgtcaggtcgatatggagtgggaaaacaccgcccggaacctgaaacgtctggagccgatcgtggccgcggccgatgccaatgtcgtcgtgctgcccgaaatgttcgccacgggattcaaactgcgtccgtcctgcgtcgccgaaccggccgacgggctggtcgtcacgaccatgcgccgctgggcagcgcagtacggcagggccgtcgtgggcagtgtcgtcgtcgccgagcaggagcggttccgcaaccggatgttcttcgtcaaaccttcgggcgagacggcgtggtacgacaaacgccatctgttccgccccggcggcgaagcgcgcgactatacgcccggcgaccgacgcgtgatcgtcgaatacatgggcttccgcttcctgctgctggtctgctacgacctgcgctttccggtgtggagccgcaaccggggcgattacgacgctattctgtgcagtgcctcgtgggccgacgaccggcgcgaggtgtggcgcacgctgctccgcgcccgtgccatcgagaaccagtgctatctggcgggcgtgaaccgtgtaggtacggatcccgacgcaagctatgcgggcgattcggcgctgatcgacttcgccggccgtacgctggccgacgccggcgaccgcgaacggacgctgaccgccgaattcgactccgaagctcaggcggccttcaaggagaaattccccgcatggatggatgccgacgacttcgaactgaagtgctgaggctctgacggctttccggtcccagctccgtcctgcctgtccgcggctccgctgtctttcggaaccccggcttggattctcgcagttcctcggcgtccgggcctgctttttctcggagtgccgggcctgttcttcctcggcatccggacctgctgtctcttcggaattccgccttgcttttcttcgtattccggctctgtctttccggcagttgcgccgcatcttgtcccggccgaattttcttccgttcgttttgttttgcgccgcatatgtcgtatctttgtacgatattcccgccggaaaaatccgctccgctcaataaacggagcttccggtgcgtttaattacgatgatgaaagaagatacgatcaaaatactgggcgcacgggtccacaacctcaagaatgtcgatctggagattccgcgccgcaaactggttgtcataacgggtctttcgggttcgggcaaatcgtcgctcgcgttcgacacgatctacgccgaggggcagcgtcgctacatggagacgctctcgatctatgcgcgtcagttcgtggggacgatggagcgtcccgacgtggacaagatcacgggtctcagccccgtggtggccatcgaacagaagacgaccaacaagaatccccgttcgaccgtcggcacggttaccgagatcaacgacttcctgcgtctgctctatgcgcgcgcgtcgcgcgcctattcgcccgtcacgggcgaggagatggtgcattacaccgacgagcagatcgccgagctgatcatgacgggctttgccggacgtaaaatcgccctgatggctcccatcgtgaagggccgcaagggccactaccgcgaactgttcgagtcgctggctaagaaaggatatatctatgcgcgcatcgacggcgagatccgcgagatttcggccggcatgcgtctcgaccgctataaaatccatacgatcgatctggtcgtggaccggctcgtcgtggccgaggacgcccgcgaccgcgtgatgacttcgctcagggagtctatgcggcagggcaagggcacgatggccgtttacgattacggcaccgagcagcagcgcttctattcgcgccatctgatgtgcccctcgacgggcgtggctttcgaggaccccgcgccgcatactttttcgttcaactcgccgcagggcgcctgtccccattgcaacggtctgggcgaggaggcggtgttcgacgtcgggaagatcattcccgacatgaagctttcgctgcgcgaaggggccgtcgaaccgctgggcaagttccgcaacaacatgcttttcgccatcctcgaaatgctgggccgccgttatgacttcacgctcgacgaccccgtcggcacgctgcccgaagcaggtctgaacgctgttctctacggcgattccgagccgctgccgatcaacctctcggagttcagttcgtcgggcggcaaccacctcgtttcgtgggagggcgtcgccgaatacatcggccgcaccgaggacgacgactccaaacacggccagaagtggcgcgagcagttcctcgtctaccgcaaatgctcggtctgcggcggcacgcgcctgaaaaaggaggccctgcagttccgtatcggcggcctgagcatcgccgacgtttcggccatgtcgatttccgaattttcggagtgggccgcccgtatcgaggagcatatgaccgacaaggagtggaagatcgcgcaggaggtcgtcaaggagatccgcgaacgcctgcgcttcctgatggacgtggggctgggctacctgtcgctctcgcggtcgtcgcgctcgctgtcgggcggcgagagccagcgcatccggctggctacgcagatcggctccaaactggtcaatgtgctctatattctcgacgaaccgtcgatcggcctgcatcagcgcgacaaccgcaaactgatccgcagtctcgaagagttgcgcgacgcgggcaactcggtgatcgtcgtcgaacacgacgaagacatgatgcgcgccgccgatttcatcgtcgatgtcggtccccgcgcgggccgcaagggcggcaatatcattgcggccggaacgttcgatgacattctcaaatccgactccatcacggccgattacctgacgggccgccgccgcatcgaaattcccgaaacgctccgcaaggggacgggccagagcatcgtgatccgcggagccaagggcaacaacctcaaaaacgtgaccgccgaattcccgctgggcaagttcgtctgcgtcacgggcgtcagcggttcgggcaaatcgacgctcgtcaacgagaccctgcggccgatcctctcgaaggagctttaccgctctttcgcccagccgctggagtatgacagcgtcgagggcctcgaacatgtcgacaaactggtcgtcgtcgatcagtcgcccatcggccgtacgccgcgcagcaatccggcgacctattccaatgtcttttccgacatccgcaaactctttgaaatgacgcccgacgcccagatccggggcttcaaggcgggccgcttctcgttcaacgtcaagggcggccgttgcgaggagtgccgcggtgcgggcgtgcagaccatcgaaatgaacttcctgcccgacgtttacgtgcgctgcaaggcgtgcggcggacaccgttacaaccgcgagacgctcgaagtcaaatacaagggcaagaatatcgacgacgtgctgaacatgacggtcaatatggccgtggagtttttcgaaaacattcccaacatctaccagaagctccgcgccattcaggaagtgggactgggctacctgaccctcggccagccctgcaccacgctgtcgggcggcgagagccagcgcatcaagttggcgagcgaactttcgaagcgcgacacgggccgcacgctctatatcctcgacgagcctacgacgggactccatttcgaagatatccgcctgctgctggaggtgctgaacaaactcgtggagcgcggcaacaccgtcatcgtcatcgagcacaacctcgacgtcatcaaggtcgccgaccatatcatcgacatcggacccgaaggcggagccgcgggcggcgagatcgtcgccgccggtacgccgcatgagatagcccgctgcaaacgcagctacacgggcgaattcctgaaaaaactgggactttagtcactacgctaagcagttaggcaccgattttgcacttcatagccgtacaaatcttttatgtgctatgaaaaaaacagttattatcgtcgtgggcctgctgctctgcgtagtcggcgctaccgtgatcggacagaaaaagaatctgtcgcccaaagaagagcgccgcgaggtgcgtgagaaaagacgtgcggaccgtatcgccagttttgagaaaacgatggattcggtcatcctttcgcgcaatttccagttcaacccccagaccatgcagcgccagccggccggccccatgcgtcagatcatgaatccggccttcaacgtcggagtatgggacggtacggtggacatctgcctgccttacatcaaaggctacgtgccgccttactacgtcatgatactcaactatacggttcccaacgtgcagggatatacgaccgagcagacccacgaaggctggatggtgaccttctcgacttcgctcttctcggcttcgacctataccttcaccttcgagatcttcacccgtacgggcggcgccaacctgacgatcaccaatccgtggtacaaccccgtggagtactccggaagcatttctcagctctattagtatgaaatccgggttgcaaagccggacggggttccgcaccccgtcgccggagggcagggcagtgcgccgcgccgccgtgccggcaagtccggaacgtttccggcggcatcctgcggaagaccgcacgccggacgctgtgccggaaccgcaggaatgcagtccgcagtcagaaccccccgcttcggcgggggcttttgtcctgcggcggttgaaaacaggccgggcgctcctctgcgcggcggctcttttctggctgatgccggtcgccgcccagtctccgcaagcggctgcaccgtctccgcaagcggccacccaatctccgcaagcttcatcctctccgcaggttccgtcctccccgcagttttcgctgggcacttcggccgtggacagcgtgccgcagacgaccgtggttcccgtccagcagcagcccgtgcagctcgtcgagcacacgacggtctatgaagacccagcccgcggcatgacccgccccgaacgccgggcctaccgggccagactctatgcgcagaagatcgactcgctggtgcagtcgcgcgactacatgttctttccgaacagcatgcaggagattcccggcggccttatccgcagcatctatgccgactacttctttttcggcatgttcgtcgatcacgtcgaaatccacctgcctaccgaacggggcgttacgcaatacgtcgaaatgctcaatttcgactcgatgtcgatccgcagttatcaggccgcgcgcttgcagtgggggtggtgcatctcgttcgatgtcgccgacggcaatagggtctatcacgccgaatttgccgtttcgacggctaccggcgagacggtgctgacgctgctgacgcccgacgttacgatgcgttacgtcggctggctgtggaacaagcggatgggcgatccgaagttccggcggatagactgacgccggcggaaaatcccggaacaggcggagcggccccgaaaagccgctccgtttttttattcgccaagccgttttggctcagcttttgtagatcaatgccacggccgagacggaaactccctcctcgcgcccttcgaaaccgagatgctctgtggtcgtagctttgaccgacacccggtcatcgcctacgcccattgcaccggccattgcggcgcgcatcgcgtcgatatggggccggagcttgggccgctgcatccggatcgtacaatcgacattcccgatttcgtatccccgttcgcgcagcagcgccgcaaccctgcggagcagaattttcgaatctattcccgcgaagtcgtccgacgtgtcggggaagtgcagcccgatgtcgcccagcgccgcggcgcccagcagcgcgtcgcatacggcgtgtatcgccacgtcgccgtccgaatgcgcgacgcatcctttcgtgtggggaatctcgattccgcccagtaccagccgcaggccgtccgccagcgcatgcacgtcgtatccgtgtcctatcctgaaatcggtcatatggtctccgtttttttgcgtaaagataatcgaaccggcatgtaaaagcaaatttatttgcccgccgcgtttccgctgcaaaaaacaggacctgagataccgaaaattgcgctgtttttaatatctttgtaaaaaataccctcgctctgcggagccggattcgcagaacgttccggaaatccggcgggggatgaagaacggactttaatttatcataggatatgtcagcaattaccaatctggaaccccgcatcgtctgggagcagttcgacgccatcacacgggttccgcgcccctcgaagaaggagggcaggatcatcgaatttctggtcgatttcgcccggaagcacaatctcgaatacaagaaggacgccatcggcaacgtggtgatgcgcaagcccgccacgccgggcttcgagaaccgtccgacggttatcctccagtcgcatatggacatggtctgcgagaagaactccgacgtggagttcgatttcgaccgggacccgatccgcacgcgcatcgacggcgggtgggtcagggccgaaggcacgacgctcggcgccgactgcggtatcggcatggccgccgcgctggctgtcctgatcgacccctccgtggagcacggccccgtcgaagcgctctttacggtcgacgaggagacgggcctgaccggagccttcgagctgggcgaagatatgcttacgggcaaatacctcgtcaacctcgattcggaggacgagggcgagatcttcatcggctgcgccggcggcatcgacacggtcgccacgttccgctatacgatggaggaggctccgaaaaactacgccttcttccgggttgatgtctcggacctgcagggcggacattcgggcgacgacatcgacaagggccgcgtcaattccaacaagaccgtcgcacgtctgttgtgggacggcatgcagagctacgagctgaagctgagctggttcgacggcggcaacctgcgcaatgcgattccccgcgaggcctatgcgatcttcggcgttccggtccggttcaaggatgagttcatcaaacgctacaaacttttcgccgccgatctcgaagccgagttccgtctgcgcgaacccaacttcaagatcacgctcaacgaaatgccgcaggtcgatcgggtgctcgacgcccggacgcagttcggactggtctattcgctggtgggcgtgcccaacggcgtgatcgccatgtcgttcgccgtgccggggctggtcgagacctccaccaacctcgcttcggtcaaattcgtgggggacgaccgcatcgtcgtcacctcgtcccagcggtcgtccgtcgagagcgccaagacctatgtaatgcagatggtcgaatcggtatttgcgctggccggagccgatgtcgctcactccgacggctatccgggctggacgcccgacccgcagtcggccctgctcgcaaagacggtcgatgcctacaaacggctgttcggcgccgatcccaaggtccgtgcgattcatgccggactggagtgcggcctgttcctcgaaaaatatcccgaactggaaatggtctcgttcggcccgaccctgcgcggcgtgcactcgcccgacgaacggctcgaaatcgccacggttccccaattctgggacctgctgctcgaagtgcttaaaaccgtctgattccgacgattatgttattcgaaccgggagaccctttgaaaaggtctcccggttttgtgtcattcggtcgccagcgggtatacgtatcctttgaaattaacaatattttgtccggaatgtcctctattgatattaacaaagcattgattcgtatttttatataatataattattagttctctgtcctgccatttctcagcacctttaattagcatatgaaattgtatgtcgccgttctttttggctgaacctttcgttatttcggcattatcgctttccgtattccggttcgagggaatctgggatggaaaatcctgtgacatccggataacggcgtgactgccttgcatggatacatagctgttcgtggaattgaccggggccttgtccgacggaaaatggaactcgtcgattttaatgataaaattccgctcttccagtgctttcaaagcctgcgtataaagtacctcttccgctgtgcttttaccgggggtattcccgctcttttgtgccgcacagcctgccagtgccataatcagtataattatagacagcggttttaatatggttttcatagttggaatggtttaatcggtataaactgcccaacataattgattgagcagctcatgtggtattatctgcatgtcgcaaacgctttcacggcggcttcgctggcatcaagtatccccgaacctttaaatcccgttaagtttcgcccttcgttgagtagaaatcttgtgtattctctttctacggttgtcgaattgtggtatttaggatagagaatccgcacggtccgataccatgcgtattcgactgcttccgcatagcccggtgtcagtctgtattgcgaggaatttctaagttcgttgtaatacttcatggcacagggggtctcgtaccacggctccggtgcgaatttcggaaattttccattaggtaattcgattcggttataatcaaatcccgcaccaccacctcctcccgtgtcgaatcctacggtgttcttaatgtaatcggcaaatgtgagaatcaaaataccgtgactatcgctgtattcttctttacatccgggtctgccacaatgactttgccaacccgcatttagatcgaatccgcatttggaatctggacaggtccaatggaatgcactggatcttgttgcgaccacgtcatccggaactgtccgatcgacggtcagatcgtcattactgcaattgctcgaaagcaatccgctacctgcaaccataaaggctgtaaagaagtttttttctgaattctgaaagttttttcataggaaataagtgtaagtgggtggtgaatattatacaagctattcattaactttatgagcaatataataaaataaattgaaacaaactaataataaattgattatttttttatcgaaccgtccttttcggcgtcaaataccatcagtctgaacatcgctgctgcaaacacttcggttttttattgggaaagtaacaaaattagttatatttgtattccgaaaagtcgctgcgcatgatcccgaaatacggttgtctgctgctcggtctgctcaccgtatgcggtgccgcggcccagcatcccgatgacgaatattacccctatgccgcccggcaggaggagcgtacgccgcttctgctgaccgactcgacgctgttttaccgcgccgtgcagacgacttccgacctctatgccgaacataccgccttcaacctgccttatgtctccgtgaaacgccggggcctgaattaccgcgacgaatccgcctcggtcggggttgtacggctttcgtctcggtatttcggggcgatgcgcctgttgggggccgatgaagtccgctatggcggtcttgccgcggcagacggcacgacgggcggtctcggcggcctgcgtttgttccgttttgccgacgattacccgcaggcgtcgcgctatgccgccgtcagttttacggaccgcaactatctggccgggacgcggttgtccgtcaccgaaccgctcggccgcggctggagcggtacgacggctctcgacgcccgtacggggcgcgacatgcacgtcgaaggcgtcttcaccaatgcgctgactgcgagcctgcgcgccgcgaagcggttcggcgacgatcacaacctgagcctgacgctcatcgttccgccctcggtccggggtacgcgtctctcctcggccgaagaggcgttccggcttacgggcgaccggctctataaccccgcatggggattccagcacggcaaggttcgcaattcgcgtgtgcggcgggagttcgtgccgctggcggtcgtctcctaccgggtgccggtttcgcaatcgacatcgcttgccgccgatttcgctgcggaatacggcatgcgcaaatacagtgcgctgggatggtacgacgcccgtacaccgatgcccgacaactaccgctacctgcccggttataccggcgaccgcgagaccgaacaggcgtggcgggccggcgacgcgcgctatacgcagatcgactgggacgaactgatcgcccagaaccgcatggcggcgggccatgccgtctatgccctcgaagaccgcgccgagcggctcggcgacctgaacttcagcgccctgtttacgactgcgctcgacgcccggctgacactgcgttacggcttggttctccgccatgcgcggtcgcgcaattacaagcagatgcgcgacctgctgggtgcggagtatatcaccgacatcgaccagtatctggtggacgacgatacctacagcaaccttctggagaacgacctgcggcgccccggccgtacgatccgcaagggcggcaggttcggctacgattatgcgctgacgacgcgccgggccgatgcgcggctgcatgccgaataccgctccgaccgcttccgcgccgatctcgttctttcgctgggcgccgccgcagtctgccgccgcgggtattacgagaaggagcttttccccggcgcgcagtcgtacggccgttcgcgccgggtgcggtttacgccctataccctcagggcgaccgccggctgggccttctcgccccgcagttacctcgaagcgttggccgccgccgaagccgtgctgcccgacgccgcggaccttttctatcagccgcagtacaacaaccgcgtcatcgacgatccctgtcccgaacgccgttatgccgccgaaatcaattacagccgtacgggcgaaacgctgaccctgcggctctcggcctatctcttggcgatgttcgacggcgtcgagacccgccgttactacgacgacatggcgggcgtgttctgcgacatggccgcgacgcggatcggacgcatggcctgcggcgtcgaagccgccgccgacatccggctctcttaccgttggagtttgtcgctcgccgcatctgcggggcgttacaaattcatccgcaacccgcggataaccgtgatctccgacgtcgataattcggtcgtggacgcccgtgccgtgagccacttgaacggttgcacgcccggcggcgcgccgcagctgacggcctgcgccgaactgggttacttcggcccgaaaggatggggattcaaaacttcggcggggtacgccggcgcgcgttacgtcgaaccgtcgctgcttcggcgcaccgagcggatcgcccgtcagggcggcacgacgcgggagatgttcgacgccttcacccgccagcaacggctcggcgacgcctttaccctcgacgcggcgcttttcaaaaccttctggttcgaccgttcgcggctgacggcgtcgttgatcctgcgcaatctgctgggcgacggcgacaccgtttacagcgcttacgagtcgcagcgcgtgcgccgcatccgttcgggcgacacgctctgctatgcgccccatgcgacgcgccttacctatgcctatccccgttcgttctatcttacagtctcttaccgattttaagacgtaagtaaaaaaatggccgatttttttggatttcgacatggaattcgtaacttaaaggtcgaaaaaccattaaaacttcaaaattccatgattatcggtattcccaaagagatcaagaacaacgagaaccgcgttgctctcaccccctccggcgctcaggagctgaccaaacggggtcacaaggtttatgtgcaggcttcggccggtgtgaacagcggttttgccgatgatgcctatacggcggtaggggcggagatgcttcccacgatcgaagacgtctacgcccgcgccgagatgattatcaaggtcaaggagccgatcgcacctgagtacaggctgatccgcaaggaccagctggtcttcaccttcttccacttcgccagcagcgaacctctcacccgcgccatgatcgacagcggggcggtgtgctgcgcctacgagaccgtcgaacgggccgaccgctccctgccgctgctgatcccgatgtccgaggtcgcgggccgcatggccacgcaggagggccgctacttccttgagaaacctcgcggcggcaagggcattctgctgggcggcgttccgggcgtgaaacccgccaaggtcttcgtcatcggcgcaggcgtggtcggcacggccgcggcgcgtacggccgccggaacgggagccgacgtcacgatctgcgatatttcgctgcagcgtctcacgtaccttgccgacgtgatgcccaagaacgtcaaaaccctgatgtcttcggaatacaacatccgcgaggaactcaagcacgccgatctggtcgtcggctcggtgctgattccgggcgccaaggctccgaagctcgtcacgcgcgatatgctgaaggagatggaacccggcacggtgatggtcgacgtggccatcgaccaaggcggctgcttcgagacgtcgcggcctacgacgcacgaggaccccgtctattatgtggacggcatcctgcactactgtgtggccaatattccgggggcggtgccctatacttcgacgctggcgctcaccaatgcgacgcttccctacgccatccagctggccgacaaggggtggcggcgggcctgccgggagaaccgcgaactcgaactgggactcaacatcgtgcagggcaaggtggtctacaagcccgtcgccgatgcatggggactcgactacgagccgctgacgctgtagtttccgccgtgcgatttttgctgcgtgattttcgccgtgcgatttctgccgtgcgatttctgccgtgcgatttctgccgtgcacttactccctacggcggttgcgccgcatccgtccgtctcgtatgccgtcggcaaggcgccggtccgcccggcgccgcagtttacgggtcctgcgatccggcggggcgtggcgcagcgtcgttcgtgcggcgggccgattcggacggccgtgtgcagttttattcgttcaaggatacggagaagtcctgcttctccgttttttatgcgtatatttgaacgatgatccgccaactcctgctcatactccgtttttactactcggccatgtttttcttctgcgcggcggtgagcgtggcgcttgcgtggctggtcaaggtgcacggtccggagatcattccgatgtgcatgctcggcaaggcggcggtctatccgctgtatctctatgtctggatcgtacagcgttacggcgatgaattcttctattaccgcaatctgggcgtccggcggcgcgaactgctgggcgtaagctgcgccgcggactttgtcttgtgctgcgtattgttgaaactgacggccctgttcctgtatgaacccctctgaaaaacataccctcgaaatcgactcggtcgaattgtcgttcggcgaccggcgtatcctttcgggcgtatatctggcggtcgagacgggcggcgtctctgccgttctgggccgcaacggctgcggcaagagctgtctgatgaagattctctgcggctccctgcgggccggtttccggtctatgcgcatcgacggcgtgtggcacgaccgcttccgggccgacgaagtgcgttacctgccgcagcagggtttcattcccggctggctgacgctggaccgggtgctgcgggattacgacacgacgcgcggcgacctgctgaaatggtttccgctcttcgaaaaactgttcggaaccaagatttacgcgatgtcgggcggcgaacggcggattctggagtgttacctgatcctgcgcagccccacgcggttcatactgctcgacgagcctttttcgcaggttgcgcccctgcatgtctccgcgcttaagcgactgatcctgcaggagcgggcgtccaaaggcattctcctgaccgaccatatgcaccgccacgtcaccgacctcgccgaccgcctttacgtcatggccgacggccgggcctacctcgcgcagggcgaagaagacctcgtcagatacggttatctgacgcatttatagcgattgtgcggccggccgatttgtttttgcgcccggcttgcactatctttgccgcaaacaaactccggcttagacaggctgcgctccggcatagcccaatgaatttggctttgcgcccggcttgcactgtctttgcaccccaatacggcacattatggcaggatcgaattttgtagattacgtaaagatattcgcccgttcgggtcacggcggagccggctcggcgcatttccgccgcgagaaattcgtggctttcggcggtcccgacggcggcgacggcggcaagggcggcagtatcgtcctgcagggcgacagccagtactggaccctgatccacctcaaataccagcgtcaccagttcgccgaggacggccagtgcggttcgggcgcccgttcgtcgggcaaggacgccaaggacatcgtgattcccgtgccgctgggtacggttgcgaaacggatcgtcacgcaggaggacggcacggaaaccgtcgagacggtgggggaggttaccgccgacggagaacggctggtgctgctgcatggcggccgcggaggtctcggcaactggcatttcaaaagcgccaccaaccagacgccgcgctacgcccagccgggcgaagagggcgacgaaggggctttcattctcgaactgaaggtgctggccgacgtgggactggtgggcttccccaatgcgggtaagagtacgctgctcgcggctgtttccgccgccaaacccaagatcgccaactatgccttcaccacgctcgaacccaatttgggcatcgtggaggtccgcgaccataaatcgttcgtcatggccgacattcccggcatcatcgagggggcgcacgatggccgcggactcggcacccgcttcctgcgccatatcgagcgcaattcggtgctgctgttcatgattcccgccgacagcgacgacgtccggcgcgattacgaagtcctgctgggcgaactgacgcagtacaatcccgaactgctcgacaaggagcgtctgctggccgtcaccaagtgcgacatgctggacgaggagctgatcgaacagatgaaaccccacctgcccgaaggcattccctcggtctttatttcgtcggtttcggggctgaatatcgcccggttgaaggatatgctctgggaagccctgcagcgttagcgaattcgacgcgccgctccgagacacggagcgtgtatttcccgttgaaatagtcgataattccatatacggaacccgtgccctgcggtacgggttccgttgcgtatgcgcatgtccccagcgtccggacccggaatgtccggccttgggcgtcggtcagcgtccgttcggaggtctgcggttccgaggtctccggatcggtgtcgcaccacggccccgcttcggtgaaccgtactccttcgaaacatacgtaggtgtctgtctgccgggggccgatggcgtcgaacgtacatacggccggccgcggccggcggtccttgtccggattgcggcgcagatagcgtcctagctcttcacgcggaatccgccctacgccgtaatcgccgtcgggcgcgactccgagctgaatcttgccgccgtaatcgcccagcgtaagcccgttgcagaagatggtgacggccgctccgaccgggtagtcgaaagcgagtcgggtgccgtcgatcaggaccgaaatcccgccgctggcatcctcgacgacgagcgtcttgtaaaattcgccgtagaaatcgttgcccgtgacgacgccttcgagcgtgatgtcctccgttacggcgacgctgtttgcggtgcagcgcgccttgaggtccgcaatggtgtgcacgccgccgggagcgccgccctcgaacgagagtttcgacgtccggtcgcaggccgccagcagcaggagcgccagcagtttaatacatgcagtcgttttcattgcggagtttgagcaggtaacggcctttgccggcgtcgtcgtattgcagaatgcccgtgagcgaacagctctttccggcggggacctcttcgccggcgaacccggcgtaattgcggacataggtgtatatttcggctcctccggcgtcggtgaagcgtttgtaccccgcccatgtaccgggcgtaaggtcttcgggcgtgtaactcaggccgtcgatccgcaccaatgtcccgcaccgcttcggcgtgagttccgcaatcgtcagcagggcgggtgcgaccggctgcggggcttcgccggtgcgacttgcggcggcgtccagcgcggctttcgagccgaggtaatccgttgcgaagccgcttcccgctgcgggtttccgcccgacctgcaatatgccgcggctttcgcccagcgccagccccttcagccgcagcgtgacgcggcttcccggcggaaagtcgttgtgcagatggtcaatacccgccattacctcaagtcccgctccatcttcctcgacgcagaacgtgcggtagaagttttcctccgcatcgctggtgttcacccggcccgacaccaccacgtcggtcgcaatcacgaacgtcgtcccggcgtacagttggcgcaattgggcgatggtcgccgtcgccggttccggctcctcgccgccgctccgttccccgaaccgggagtcgtaacatccggtcagcagcagaaaggcgcataacagcggcaggcgtcgcataagctccgttattcgatgcgtgaatccttcaggccgaggaagtagaggatgccgtccagtccgatggtcgagatcgactgccgggcggtggccttcactttgggtttggcatggaaagcgatgcccagaccggcgagattgagcatcggcaggtcgttggcgccgtcgccgacggctaccgactgggcgatgttgatctcctcgaactggcagagcaggcgcagcagctcggctttgcggcggccgtccaccacctcgcccacgtagcggcccgtgagtttgccctcctcgatttccagctcgttggcatatacgtagtcgaatccgtatttctggcgcaggtagttgccgaagtaggtgaagccgcccgacagaatggccgtcttgtaacccacgcgcttgaggatggtcatcatgcgctccagcccttcggtgatgggcaggctgcgggcgatctcctccatgaccgagacgtcgagacccttgagcagggccacgcggcgcgagaaactctcgcggaagtcgatttcgccgcgcatggcgctggccgtgatcgcccgcacctcttcgccgactccggcgcgttcggccagttcgtcgatcacctcggtctcgatcagcgtcgaatccatgtcgaagcagatcaggcggcggctgcggcggtagatgtcgtccttctggaacgagacgtcgagaccgatctccgagagattcatgaatccctcctgcatggtgctgcgctcctcgtcggtgagcgacccgcgcaccgaaagctcgatgcaggatttggccgcacggtcgtcctcgctgagcgggatgcggcccgtcagacgctttatggcgtcgatgttgagtccgtgttcggccacgacgctggtcacctcggcgatatgccgcgccgtgacggtgcgtcccagcagggttatgatgtatcggtttttgccctgacggcctacccagtcctcgtatttccgctccgcaatcggcgtgaagcggatcatcacgcccagctccgaagccttgaacagcagctctttcatgatgtttcccgacttgtcggacgtggtcttgaacaggatgcccagcgtcagcgactggtggatattggcctgaccgatgtcgaggatgaaggcgtcgtagcgcgcgagtatttcggtgagcgaagaggtcattcccggcttgtcttcgcctgagatgtttatctggataatttcaacgttgttctgcatcgtttcctgtttccttttggtaaattcgtagacaaagttagtaaactttcttttttttggttatttttgcatgataaacttaaaaatcggactttatgtggtcttttctcgtgccgttttttacggaaacgcccgaagcgcctttgattctgcccgacagcgtgcagaaagccaatctcgccgaggcggtgaataaaatcatccatctggacgtgggcgacatgctgcgctctctgctttccgaatccgtctggatactggtgaagatcctgatcgcgctggccatctatttcatcggccgctggatcgtgcgccgcatcgtgcggctgctcgacgccgctttcgagcgccgtcaggtggacacttcgctccgctcgttcctgcgcaataccgtcaaggtggtcttcacgctcatcctgctgatgatcgtcgtgcagaccctcggcgtcaacgtcacttcgctcatcgccctcttctcggccgccacgctggccatcggtatggccctgagcggcacggcccagaacttcgcgggcggcgtgatgatcctgctgatgaaaccttaccgagtcggcgatttcatttcggcgcagggccagtcgggcacggtgcgcgagatcaaactcttctcgacggtcatcaccaccggcgacaaccagacgatttatattcctaacaattccattgccacggcgatcatcgacaattattcgacctccgagacgcgccgcgtggactggacgatcggcatttcgtacggcgacgacgtcgatgcggcgcggagggcgcttctcgacctgctggccgccgacagccgtgtgttgaccgacccggctcccgtggtgtgggttgcggcgctcgccgacagctcggtgaacctttcggtgcgcgcatgggtgaaaaacgccgattattgggacgtgtttttcgagaacaacgaaaaaatctacaaactgctgccgctcaagggcatcagcttccccttcccgcagatggacgtacatgtgaaacaaaactaagtgaggagtatatgaaaaaattattgtttgccgcagccgcagtctggctgctggccgcctgcaacaaggagcttggtcccgaatacgagacgccgcccgttttcgacgaagtgactttcacgacggcgacgcagccggacaaaatcaccgaaccggtgaaggtggacgaggtcgtgtgggtgaatgcgacggtatcctgcccgtacaaggtcaaacaggtgtggcttgcctacttcgtggacggcgacgagtccaatgtggtgacgactacgcctttcaattacgacgccaccaccgttacgttcagggagcggattccgggacagaaggccggagcgaaagtgtcgtttcaggtgcttacccgttccgattatgtcttcatgtggacccagacgtatacctataaggtcgagggcggcgaagacgaagaaaagccgaatcccgacctgccggacgaaaactaatttttatcagagatatcgtttatggaattaaaagaaattctggccatttcgggccagcccggactttataaatacgtggcgcagtccaccaacggcgtgatcgtcgaatcgctgctcgacggcaggcggatgaacgcctcggcgtcgtcgaaggtcagctccctgaccgagatttcgatgttcaccgaaggcgaggacattgcgctggcggacgtcttcaccaaaatctatgcgcatacgggcggcaaggaggccatcagccccaaggaggcgcctgagaagctgaaagccgctttcgccgaggtccttcccgaatacgaccgcgaccgggtgcacgtatccgacatgaagaagtgcttcgcgtggtacaacattctggtcagggccggttttacggagttcaaactcccgtccgaagccgaatagaaaaagtcccgctctcggagcgggactttttcgttgtatccggtgtgattccggcttttttcatgccgccgaattcgcggtttatattatctttgtgcaatagcgaaacaaacattcaagcaactgacattatggaacgaaggacgaaagtgctggcattggttgcccacgacaacatgaagcacgatctggccgaatgggtggactggaacagcaaaaaactcagccgtcaccatctggtctgcacgggtacgaccggcaagatggtcgaaaaaacgctgcgcgaccaccgggaagagtacgagggtgaggaggagatcgaagagcttcccgatctgaggatcacgctgctcaaatccggtccgctgggcggcgaccagcagctgggttcgctgatcgccgacggcaagatcgacgcccttattttcttctgggacccgatgtcggcccagccgcacgacgtggacgtcaaggccctgctgcgtctggccacgctctacaacgtgccgacggccatcaaccgttcgtcggccgattttctgatctcttcgccgcttttcgaggacgatgggtacgtacccgtcgtcaaggactacaaagcctatgtcgagcgcgtgctgaaatagggtggcgcgccgttttacaggtcgtgcgacagcggggcgggaaccgtcccgcttacgtcgaagtcgccccagcgccgggcgatcgagtcgagtgtgtcgaacagttcggggatgtcgagcgacgtgacgagcttcaggcgcgtcggcttgaagtcgggcagtcccttgaaatagttggacagatggcggcgcatttcgaggatgcccacgaattcgccctttacttcgagcgacttgcgcagatgctccttggcgatttcgacccgttcgcacaccgacggctgcgggagcacttcgcccgtggccagatagtgcttcacctcgcggaatatccacggccggccgtaggtcgcccggccgatcatcacgccgtccacgccgtagcggtcgaacatctccgcggccttcggtcccgaatccacatcgccgttgccgatgatcgggatctgtatctgcgggttgttcttcactttgccgatcagcgtccagtccgcttcgccgcggtacatctgggcgcgtgtgcggccgtgaacggtgagcgcggcgatgcccacgtcctgcaagcgcaatgcgatctcctcgatgttcttcgactcctcgtcccagcccagccgcgttttgacggtcacgggcttgcgcaccgcctgcacgatccggcgcgtcatctcgaccatcagcggcacgtcgcgcatcatgcccgatccggcgccgcgcccggcgattttcttcaccgggcagccgaagttgatgtctatgatgtcgggaccggccgcttcggccatgcgggccgcttcgaccatcggttcgatcaggtggccgtaaagctggatgcccacgggacgctccgccgcgtcgatttcgagttttttgagcgacttggccgcgtcgcggatcagcccgtccgacgaaatgaattccgtgtagaccacgtcggccccgaaccgcttgcacatgtagcggaacgaagggtcggtcacgtcttccatcggcgccagcagcaggggcttttcgccgagttctatatcagctattttcatgggttctggttcgttttttccgatgtttcgcaggcgaggatcttgtctatgcgggcgccgtccatgtcgacgatctcgaacgtgaaggtgttccacctcagtttttcgcccgtctgcggaatatgccccagctcgtcgaggatcaggccgctgagggtgttgtagaggttgttcgggtagacgtcctccagcccgtagcagaccagaaaatcgtaaaacgggcactgcccgtcgatcaggcagctgccgtcctcccggtgaacgatgtccggctcctcccgctcttcgggaatcgagcctaccagcgcttcgaagatgtcgtgcagggtgacgatgccctgcgtcacgccgaattcgtcgcagacgatgccgtagccgacctgctcgctgcggagttgttccagcgcggtgtacacttgggtctcctcgtggaagaattttgccggacgcagtatggatgcgacgtcgaaatcctcctcgccgatgtgcgtgaagaggtccttgaggtatatcacgccggccagccggtcgaggttgctgcgggcggcggggtagagcgtgtggggttccctgccgaccagctcgcggatctctgcgggcgtcatggcggggtctatccatgcgatttcgctgcggtgcgtcatgatcgaacccaccttgcggtcgccgagcgagaatacgcggccgacgatctgctgttcgacgatctgcacctctccgtcttcggttccctcctgaatgatcgacttgatctcctcctcggtgaccttgctctccgtatcccgtattccgagcaggcgggcgataagctcgatgctgcgcgaaagcagccatacgaagggcgacgtcaccttggcgagcacctgtatcggccgtgcgacgagtatggcgacccgttcggcgcttttcatgccgatgcgtttgggcaccagctcgccgaagacgatcgtgaggtaggttacgacgatgacgataagtatctgggcgaccggaacggccgtgcggagcggcatgcccagcgatgcgagcatcgcgccgaagcggccggccagcgcttcgcccgaatagatacccgtcaggatgccgatcagggtgatgcctatctgaatcgtggaaaggaatctgtccgggtcctgagccagctggagggctttggcggccgccttgttgccctgcttggcgcgtgccgtcaggttcgagcggcgcgccgagatcagcgcgatttccgacattgcgaaaagcccgttgagcaggatcagcaggataatgatgatgatttccatgaaaagcgtgtaatgtagcggcaaagataagcattgtttggaatttcgggggcgccgcggccgcaatttgtgagaattatggctttgcgggattggttattagccgaaaaacgctaaatttgcaggcaaatcttttgtgttatgaatattgaaaactttatttcggatgcggtccgccgttcggtggaggcgctttacggtccgctcgacggcgaacaactgcagattcagaagacccgcagggagttcgagggcgattacaccctcgtgacgtttccgttgctgcgacgaagccgcaagtcgcccgaagccaccgcgaccgagataggcgaatatatgacggccaacgtgccggaagtcaagtcgttcaacgtcatcaagggtttcctgaacctgaccctcgactgcgcgttctgggccgcccgttttgcggagatcgccgccgacgcgaacttcgggcaggctcccgacacgggacgtacggtgatgatcgaatactcgtcgcccaacaccaacaaacccctgcatctgggccatatccgcaacaacctgctgggttactccgtggcgcagatactcagggccaacggtcataacgtcatcaaggccaatctggtgaacgaccgcggcatccatatctgcaagtcgatgctggcttggaagctttacggcaacggcgagacacccgcttcgtcgggcatgaagggcgaccacctcgtcggcaaatactacgtcgagttcgacaagcattacaaggcccagatcaaggagctgacggcgcagggccaaaccgaggaggaggccaagaaaaacgcccctgtgatgctcgaagcgcaggagatgctgcgcaaatgggaggccaaggaccccgaagtctattcgctctgggagacgatgaacggctgggtgtacgaaggtttcgacgtgacctacaaggcgctgggcgtcgatttcgacaaaatctattacgagtcgcagacctacctgctgggcaagagtctcgtcgaggagggactccgcaagggcgtgttctaccgccgcgacgacaattcggtctggatcgaccttacggccgacggactggacgagaaactgctcctgcgcggcgacggcacctcggtctacatgacgcaggacctcggcacggcttaccgccgcttcgaggagaacaggctcgacgacatgatttatgtcgtgggcaacgagcagaactaccattttcaggtgttgaagctcatcctcaagaaactgggctatgccgactggagcgaccatatcacgcacctttcctacggcatggtggagcttcccgaaggcaagatgaagtcgcgcgaaggcacggtggtcgatgccgacgacctgatcgcagacatggtatccacggcccgcgagatgtcggacgagctgggcaagctcgacggctgtacggaagaggaggccgacgccgtttccacgatggtcggattgggcgcgctcaagtatttcatcctgaaggtggacccgaaaaagacgatgcttttcgatccgcgcgagtcgatcgacttcaacggcaacaccggcccgttcatccaatatacccatgcgcgtatctgctcggtgctgcgcaaggccgccgaagccggcatcgacttctccggtgcggcgcaggcggattacctgcccgaagagatcgccctcgtgaaatcgctgaccgaatatccgtcggtcgttgccgccgcaggcgagaacttcgcgccttcgatcgtcggcgcctatgtgtacgagctggccaagcagttcaacggttactaccacgaccattcgattctcaaggaggagaacgacgaaacccgcagaatgcgtctccagctggctcagcaggtcgcccgcgtcatccgcagcggcatgaaactgctcggcatcgacgttccggaacggatgtaattctccggcgcggatgtaatttgccgcaccgtccgggcggaatgcctttttttgtgccgagaccgggacgaagagggtggggtgttgccgcggcagaatccggccgggtttccgccactttcggacgccgagcctgagcacggcgtctcccggatgaaaggcaaaaacctgggccgtccgtttcttcggctacgataaaaaagaggaagaacgtgaagtgcaccccaaatattggacggattagtatttgtttagatggcatgagttcggtattgtaccgggctcatgttgtttaagtatttctttatccgcttgttattgtagtagtcgatatattcttccaattcttttcggaaatggtctatggatgagaatttttgcaaatataataattcggacttcaataatccaaagaaactttccatagcagcgttatccagacagttacccttgcgcgacatgctctgtgtaatacctttctgtcttaaacggagctgatactgcttcatctgatactgccagccctggtcggaatgcaagacaatacccggagaatccggtattctggcaaacgcatcgtccagcatcttcatgatctgcataaagttagggcgttcagctattttatagctaataatctcccggttatataagtccataatcggcgatagatataactttacgccgcaaaccgaaaattccgtaaggtcagtaacccacttctgattcggtttttcggctgcaaagtcgcgttgcagaagattgggcgctatccgtccgatctgtcctttgtatgaacagtatttacggagcctgacctgactttttatcccgcaaatattcatcagcttaagtacggttttgtgatttatcgcatatccgatcttattcatttcaacggtaatgcgccgataaccataacgccccttatgttcgtgatataaccttataatactctctttttcgcgagcatatttatcgggttgttttgattttctgaagtgataataaaatgtgcttcgcgccatccctgcggctttgagcaatactgaaagccggcactgcggccttagtccttcgatggcttgggctctttcccgctctcgcggacaatgcgctcctcgactaaggcctgcaatttttttaagtaagcattctcggcacgaagatactccagttccttaagcaactcttcgtgcggagtcgttttgagtttgacttttttagtcttcgatttactcatggccggcctccttctttgcggtttacgccgcaggccttcagcaccttggttttgatagagccgctcccattgacgaataacaaaagggcccggaatgccgaaatgcactgctgtctccagcaaagatagatgattttggtgcatatgcttcaaaactgacaacttaaattctgcactgtagctaccgtggcgcagcttaaggccggcaaggccatggcgctcgaataatgttacccacaagtgaacttgcgagcggccacagcccaagtgacatccggcttccctaaccgaaagtccgccttcgagtaccagttttacggcctttaaacgaatctcataattatatttcataaaaaacaccccaaaagtgtccaacttttggggtgcagtacacgatttgtccgcttttcttcggccggcgctccgcccgcttcccatgcaccgcccctccttgacgctccgttctttcatatccggttttgcgccttatccgaaaatccgtgcggagaatctttccggcgcgggtgcgcagtcgccatatttttactatttttgtctgcatgaaacttacctttctgggaacgggcacctcgcagggtgtccctgtcatcggatgccgctgccgggtctgcacttcgtccgaccggcgcgacgaccgtctgcgcacctcggccatggtcgaggcgggggacgtgcgcatcgtcatcgacgccggacccgatttccgctgtcagatgctgcgcaccggcgtccgccgtatcgacgccattctgctgacgcacgaacataaggaccatatcggcgggctggacgacgtgcgggccttcaatttcgtcgattacccgccgacgatccaccgcatcgacctctatgcggctccccgcaccctcgatgtcgtgcgcaaggatttcgactacgccttcgcgcaggacaagtaccggggcgttccggaaatcgaactgcacgagatcgacgttacgcggcctttcagcgtcaaaggtgtcgaaatcctccccgtttcgggacaccattcggaacgctttgcagtgacgggattccgcatcggcaggctggcctacctgaccgacttcaagaccattgcggacgccgaagtcgaaaaactgaccggtctcgacgtgttggtggtcaatgcgctccgttttgccgagcattattcgcacttcaatgtggccgaggcgctggagctgatcgcccgtgtctcgccgcgcgaagcctacctgacccatatgtcccacgacatcggcctgcacgccgagacggagccgacgcttccgccccatgtgcatatggcctacgatactttggaaattgaaataaacgattgatatgaaaaactttaaggataaagtcgtcatcgtgacgggcgcttcgtcgggcatcggcgaggcgatggcacgcgaattcgccgcgcagggcgcgcgggtagtgctgggtgcgcgcagcgtgcagaaactgcagctcatcgcgggcgaaatccgctcacagggcgggcaggccgcctactgcggcgtcgatgtgacgaacgtcgacgagtgccgccggttgatcgagaccgccgtgaacgagttcggcggaatcgacgtgctggtctgcaatgccgggctttcgatgcgtgcgatcttcgacgatgtggacctcggcgtgcttcaccgcctgatggacgtcaacttctggggtacggtcaattgctgtaaattcgcgctgccgtatcttcagcagtcgcacggttccatcgtcggcatctcgtccgtcgcggggctgcacggtcttccggggcggacgggctattcggcgtcgaaatacgccatgacgggttttctcgaaaccctgcgcatcgagaatctcaaaaagggcctgcacgtcatgatcgcctgccccggcttcacggcttcgaacgtccgcttctcggccctcacggccgacgggtcggcgcagggcgaaaccccgcgcaacgaggccaagatgatgacttccgccgaggtcgcccggatcgtcgcccgcggcgtcctgaagcgcaagcgtctctgcctgatggagagcgaggggcgcgccacccatttcgtcaagaaattcgcgccgggtttcctcgacaggatgttctatctggtgatgtccaaagaacccgattcgcccttgaaatagctccggactccggcgaaaaatggagcggaaatggaccgggcggttgcatgtccggcacggctgaaagaaaaggcgtcctgttttcaggacgcctcttttgttcgttcggagtctatttcccctccgttgttgttccctccgtcccggagcttctccgcagcgtccgttccgaaatccggatgctgtattcgtacaatccgaacaacggcagcaggaccagaatcatgctgaatacgtcgggcggggtgatgaccgccgagagaatcgccagcgcgacgagggcgtggcggcggtagcggcgcaggaaatcggggcttacgagacccatgcgggtcaggaaatagaccagcagcggcagctgaaacaccacggcgcaggcgatcgagacgttgagcacggtcgagaggtaggagccgacgtcgatcatgttggtcacctgctcgctgacgctgtactgagacaggaatccgatcgtcagcggcgcgattacgaaatagccgaacagcagtcccgcgaaaaatcccgccgagacatagaacacgaatctccggcatccgcgcagttcgcgctcggtaagcgccgggcgcgcgaagcgccacaactcccacagcaggtagggaaatccgatgcagaaggccgcgaccatcgagattttgaggtgcaggttgaactgtccggccatcgccgtattgatgagctgcatgcgctcgatccccggcacgaattcgatccctgccagtccggccatccataccagcagccggttggtcggaaatccggccgacatagggccgaacagcactccgtcgatcagcagccctttgcagaggaatgcggccacggccagcgccagtatcgccagcacaccgcgcaccaaatggggccggagcgcgtcaatgtgctcggcaaaggtcatttcgtccgtgtcgctgcgtttttggccggacatgcgggcttatttcttttcttcgggggtttctttccgggattcctgcggcgcggcctgctctttcccgttcttctcgtcgcctgccgcgggattttccatggcgtccttgaactccctgacgccgcggcccatgccgcgcatcagttcgggtattttcttgccgccgaagaagatgacgacgatcagcaggatgaccagtatttccgtcaggccgattttgcccagaaacagcgggtgaatgaacatcattgttttatcggttttcgttcgttgcggggcggagtctccgcctcagcgcaaatgtaataagaatttccgaaacctccctcttccggttgaaaaaagcggaacgcatttgtgatgcgtcccgccctgtacggtttgcgaaatgcgttccggctccgaaacgcatttacgctgaatcttctctttggagttgccggccgaatctccgctacaatgcacccgcccgaaccggttcgccctttggggtattcctatttgaagaatatcgacgaaatttccttgtagttgtgtacgcgctcgatcacgtcggcgaacatgtcggcgatggtcagcaccgtgaatttgtgcaggtccttgtcggggttgagcggaatggtgtccgtcacgattacctcctccagcgcgctgtcgttgatgcgctcgtaagccgggcccgaaagcacggggtgggtgatggcggcgcggacactcttcgccccgcgcgacatgagcatgtcggcggccatgcagatcgtgcccgccgtgtcgatcatgtcgtccacgatcaggatgttgcggccttcgacctcgccgatggcggtcattttgcccacgacgttggccttggcgcgctccttgtgcgaaatgatgatcggggtgccgagcagcttggcgtaggtgttggcgcgtttggcgccgcccatgtcgggagcggcgatcgagaggtcctcgattttcaggcttttgatatagggaatgaagatgccgctggcatagagcgcatcgaccggaacgtcgaagaatccctgaatctggtcggcgtgaaggtccatcgtcatcacgcggtccacgcctgcggccatcagcaggttggctaccagtttggcgccgatcggcacgcggggacggtccttgcggtcctgccgcgcccacccgaagtaggggatcacggccacgaccttgtaggccgaggcgcggcgtgcggcgtcgatcatcatcaacagctccatcaggttgtccgagggcgggaacgtggactggatgatgaataccgtgcagccgcggatcgactcgttgtagcagggctggaattcaccgtcgctgaagcgcaggacttccgattgtccgagtgtcgtaccgaaacttgccgcgattttctcggccagatattccgagccgcgacctgagaaaattttgattttgtggatagccatagaagatggatttttgatggtgcaaatataggacaacgcggcgaaaaaacgttccctccggacgaccttttttcaacaatcggttaaacattcaggcattcgccgataaaaccgagtatctcctcgcgtcccgtgccgtgctggctcgacgagacgaacatccggggcagctcctcccactgctccgcgagcgccgcccggtagcgttcgacgctcttttcgcgctgcgttttcgagagtttgtcggccttggtgaatatcacggcgaacggaatgccgttcatgccgagcatttcgatgaactgcaggtcgatcttctggggttcgagccggatgtccgccaatacgaacaggaagtgcatcttctcgcacttgagcacatagtcggtgatgattttggagaactcgctgcgtttggttttcgacgtgcgggcgtatccgtagccgggcagatccaccagataccatgcgttgtcgatcaggaagtggttgatgagccgtgtcttgcctggcgttcccgatactttggccagcccctgccgtccggtgagcatgttgatgagcgacgacttgccgacgttgctgcgcccgatgaaggcgatgtctttcagcgcgtctttgggcacctgcgaaatacgctcggaactgcacttgaattcggctttgttgatctgcatgttgtcggagtttgcggcaaagacagtgcgggccgggcgccgggccgctgtctgtctgagcggatgtctgctgcaaagatagcattttagcatctatatacaaattataccgcatgggaaaaccgccggtcgttttcgccgccttcggcgtcgtttgcaattctgacccacccccaaacccccgcctcaggcaggggcttagtgccgcgaagcggcaaaataggtgctgacgaacggtcgtgtaaaatggtatatggggcccctgctccggagtctaccagacgagcgacacccacagcgggcagtggtccgaagcgacggtggtgtaatccaccgtgcgttcggcgattttcgccgactgcggcaggccgcggcccagtatgtagtcgatgcgtatcgaaggacggtccgaggggaacgtaagctgcgcggtgtccgacagcggcctgaattcgccgcccagcccgccgagtaccttcccggcgtcgtccatgttgaagtcgcccgccagcagcacgggtttgcggcaggtgtcggtggcttgacggatgatcggcagcgatgctcgctggtcttcgggcgtgagcgataggtgcgtgacgcagaccacatagccgggaaattccgccatcagcagcacgcgcgcctcttcgcgccccggaagcgggatgcggcgcaccgagagcggctcggcgcgcgacagcagcccgatgccgtaacctccgccgtcgtaatcaatcgcgcggcagaaacgggcgtgcatgcccgtcatccggcccagctcttcggggatgaagcggccgttcatgcgtcccgtcacgctgtccacctcctgcagggccaccacgtcgggcgcgacccggccgatgacctcggcgatgcggccgaggtcctgtacgtcgtccgctccgcggccgtttcggatgttgtaactcatgaatttcacggccgtggtctgcgtcgtgcaggccgccggcatcagggcgcagaacagaactgccagtgcgacggaaaaatattgcttcatgacttttcgggattttccgcaaaggtaatacaacctcccctgaatggcaaataatccggcccgccgttgtgtccgccgttgtgtccgccgttgtgtccgccgttgcgtccggcgttgtgtccggcgttgtgtccggcgttgtgtccggcgtcctcgtccggcgttcctgtccggcgttcccttccgccgtgaccgcggcgtgggttccggcggcgatggttaatgcagactaaaaaccggatattcagatttttcggacttttcccgttgttattcccggtaatttttcgtaccttttagcatccgatttgcatcttgcatcggagtaaatacatctatgcttatgaaaacacaatttctgaccgtgttcggcgccgctgcgctggccgtttttcccgcagaaccggaagcctgcacgcgcgccgtctatctcggtcccgacggcatgactgtcacgggacgcaccatggactggcgcgaagacccgctgaccaacctctatatcttcccgcgcggcaccgcccgccgcggagccaatacggacgacaccgttttctggacctcgaaatacggctccctttcggccgcgggctacgacatcggcatcaccgacggcatgaacgaggccgggctggtcgccaacctgctcttcctgcccgaatcggtctacgagcggccgggcgacacgcggcccgtcatgggactgagcatctggacgcagtacgtactcgacaatttcgccacggtggacgaggcggtcgccgaactctcgaaggagaaattccgcatcgacgcgcccgaccttccgaacggcgtgcagtcgcgcctgcatctggccgtctccgatccttcgggcgacagcgccatcttcgaatacatcgacggccggctggtgattcaccacggccgccagtatcaggtgatgaccaattcgcccttctacgaccagcagctggcgatcctcgattactggcagcagatcggcggtctgacgatgcttcccggcaccaaccgcgctccggaccgcttcgtgcgcgcgtcgttctacatcaacgccgtcgtgaagagtcccgatccgaagatcgccgtcccggccgtgatgtcggtcatgcgcaacgtctcggtgccttacggcatctcgacgcccgacaagccccacatctcctcgacgcgctggcgcacggtctgcgaccagaaaaaccgggtctactatttcgagccgacgctggccatggagaccttccgggtcgatctggcgaagatcgacttcggcaagggcacgcccgaacgggtgttgaagctggtcggcggccggacctacacgggcgacgccacggccgaattccgcaggagcgacaaacccttcgtcttcctgttcggggtctgacgggccggaatatccgaccgatccgcatgtgccgtgcagttccctgtccggcgcatgcggatttttcgtatatttgtccgctcaataaacacaatatgaaaagtttcgaacatttaatcatcacgcggttcaatctgaacctctatgcgcgggacaaacacgacgctccgacgcgcaccgaacggtggctcgaacatcgtttcgagatcttcgaacgctattgcctgccttcggtggcggcgcagaccaacccgaatttcaggtggctctgtcttttcgacgcggcgacgcccgcggcttaccgccgccgcatcggcggttaccagtccgtctgtccgcagttccggtccgtattttacagcgccgggcaggccggacgcctgaccgaaagtctgcgcactacgatttcaggcctgctggccgggcgtgaagagctggccaccccccccctccgcagctgctgattactaccaatctcgataacgacgacgcattggccgccgacgccgtcgaactgcttcagcgcgaaatccgcttctcctccggcaaacgcatctacagccttctttacggttaccagtatttcaccgaccggcgcttcgcgctcaaaatgcgctacacgaacaatcacttcctgacgctcgtcgagccgttcgatgcgcactccgaaaccatcgtttcctaccgtcataccaaagccatccgccagcagcccacggtctacctcgccaccgataagggcaagtggctcgaaatcgtgcacgaggacaacgtcagcaacgattttcgaatcaatatcaaagttgtggtatattcccctgctctggggccgccggttcgccgatttcggcctgcctgacctccatgttccgggactgcggcagtggttctgcacgctgtgcgtcgttcccgcgcggtttctggtcacggcggtcctgcgcctgcgccgcaagtgggcgctgcggcgggctgcgttaccttagtaccgggtatttgttgttgaagcggaatcccacgcccagcatcaggtagttcggggtctggaaatccttgagacagtagcctatgtggacgaacgtgcgccgtgtggcagcgatcttgagcgtcagcatctgatagaacgacttgaggtcgccgcccttgtgcaggacgttgactcccagtccgatgccgaccgtgaagtagggcatgacgaattcggcgcgtcccgatattcccagtgcgatctgccggtcgatcgacggggtgtagaacgtgtagccgggatcgcggcctccgacctcgacgatataatcttcggtgtagacgttggcgctgccgtcgtagacgccgtccagcgagagacccgcgcggaatttataaccgaagttgtacatcgtcgcgaagttgaagcccgccacgccgtaggcgttgggcgaagcgtactgcttgtcgccgacctccacgcccttgcggcgccacgatccgaacagcaccagatcgtagctgaaatggcgggggaaatcgggcgcgagaagcggcctgcgcggttttacgagcggatcgtcggcccggccgaaacagtagagcaggccgaacttcatgccgatcgagttgagtcccgcattgggaaatttggtgttgccgttcgaaaagtgggtcatcgagagtcccgccgagaaatccagctcgcgcgtgagcgtcacgttgaggtagaaatcggcgttgatgtaggcgtttatcttcgaccccatcattatgttggccgggttcatctgcgcgtcgtagggtttccagccgaacgacagtccgaaattccactcgtagttgaacgacagccgccggcttatccgcgcgatgcgcgccccttggaaaatatagaacgccacgggcgtgcccagctcctcccggttttcgaaactgtagtaggagaacccgattccctgataggcgcctccgtatatccggtcgggacgcgatccgggctggaagcggaacgagtagcgcaggtgggcggccagcgacaggtcgatcggctgccgggccagattgtcgcccgcgaggaacggattggtcggacacacgtattccggacggagttccagcccgataccgtggacgaagcgacggcgggggaatgctgccgtactgtccgtacgggtgttggcgcccgtcgcggaggctatgcgggtgcccgcgtttggcacgaaaccggtgctggaaccgttgttgccgtcgcccgtcgcggaacttctgtcggagttaccgctgtttggcgcggatccgccccagttgccggcgcccccgctctctgccgtgccggacccggatcccggacccgttccggatgcgccgtccggatgttttcccactgcccccgatccggcactgaacccagcctgaaatccggtttcgtatccggtgcggtaaccccttttatgtccgtctctgtatcctgcgtcgtaccctgcggcatattcggccgaacgcgccgcgctctgcgccgacggctttgccggccggggcgtcgtcgtttcgggcgaaccgttcgctgtgccgggagcggattcgactgtcggtttggcgtcggattttgcggtttcgggggattgcggagcgtccgttttacaggcgccgggaccgcttgcgccggtcggactgccgactggttcattaatcgtactgttgacctgatagagatctgctgtcggggattccgttgttgtcggatcgccgccgcggtttgcgttcgccggggcagacggagtttccgaaacacctgccgtcgtcagatccttacggctctcgtccgccgcttctccggctgtggcgaagccggacagaaagagcatgcttcccgcaagaagccccgtcaatcctttccgtattttacattccataatggcctatccccgttttgatcgcacaagatacgaatttttgccggagcgcaaagcgacaattcgaaaaaatcccgcctgcaatgcgattttcagcggcttccgatagcatttccggggcctaatcgccggcaatacggactgttatttggtttcttcgattattgtctctatctttgtacccgaaccaatatccgctccgatgagaataaacgattagtaggtcggtttcattaaaccgacgccgtgccgtaaaacaacccggtctgaggtttaacaggtccccattctgcgggaccgctattaatcgttttcatatgagtattatccttagcggtgtttcgtaccgctaccgcaatcagcaatttctgttcgaaggaatagacctgtccgtcgccgcgggcgccaaagctgccgtcgtgggcgacaacggcgccggcaaatcgacgctccttaaacttgtcgcgggcgaactcgctcccgccgcgggaagcatcgcctgctcctcgcgtccctactatgtgcctcagcacctctccgccgccggcatctccgccgtcggcgttttgggcgtcgcggacaagctcgatgcgctccgcgccatctgcggcggcagcgccgatccccgctgttacgacattctggccgacgattgggacgtcgaagcccgctgccgcgccgccctcgaccactggggactgccgcacgtcggcctgaccgacccggtcgatgcgctgagcggcggcgagcggacgaaactctgtctggcggggatttcggtccataacccctctgtcattctgctcgacgaaccgaccaatcacctcgacacgtcgggccgccgcaggctctatgacctgatccgtgccagccgcgcgacgatcgtcgttgtgagccacgacgtcgcgctgctcaacctgctcggcacgacctgcgaactctctgcgaaaggactgaaagtctacggcggcaactatgatttttaccgcgaacgcaaacggatcgaggaggaggcgctggcccagcaggtcgattccgaacagacggccctgcggctggcccgcaaaaaggcgcaggaggtccgcgagcgacaggagcggcggatgcgtcagggcgagcggcacaaggaccagcttccgcgcatcctgcgccggacgatgaaggacagcggcgaacggaccaaggcgcagctcgtcgggaaacatgcggagctgatcgacggcagtcgggagcggctggacgaactgcgccgccggcagcggacgcagtgcgagctgaaaatagatttcgacgacgcgcagcttcacgacggcaaactgctggtccgggccgacggcctgaatttcgaatatgcgcccggccgcccgttgtggcgcgaaccgcttgcgctggagatccgcagcggcgaacgtatccgcctgaccggcgacaacggcacgggcaaaacgaccctcgtccggctgctgaccggcgaactggaacccactgccggacgcatcggcagggctgacttctcgtatgtctgtctcgatcagcaatacagccgtgtgaacaccccgcagagcgtgctggaactggcgcagagctgcaatcacggcaatctgcaggaccacgaactgaaactgcggcttcaccgtgcgctgtttgggcagcagatgtgggacaagcggtgcgatacgctgagcggcggcgaacggatgcggctctgcctctgcagcctgatgatcgccaaccacgttcccgatctctttgtcctcgacgagccgaccaacaacctcgacctttcgagccttgcgatcctgacccgcacggtccgcaattatcgcggcactctgctggtcgtctcccacgacgacaatttcacccgtgaaatcggaattacccggacggtcggactggaatcgccgccggccgaataaaaagcggaaccccggaccggaagaacgggactcagacggcaataataaatccggccccgttggaaagggccggattcattgtcaacggggccgggcattatttgtttggtgccgcgtctcgcgtgcggactaatatccgagtattctcagcatcgagcggtaggactgctccttggcgaacaggcgcgtgtaatactcgttgtcgctcttgtcgcggtcgatgatgatgtgcttgggcgcgggaatcagacagtgctggatgccgccgaagccgcccagcgactcctgataggctcccgtgtggaaaaatccgatgtactgcgtgttgcccggttcgagcttgggcaggaagatggcgttggtgtgcgactcggcgttgtagaaatcctcgctgtcgcaggtcagtcctccgagcagcacgcgctggtactccttgtcccagttgttcaccgccagcatgatgtaacgctggttgatgccccatgtgtcgggcagggtagtgatgaacgacgagtcgatcatgtaccagttctcgcggtcgttctgctgtttctggttgacgatcgaatagagcgatgcgccgctttcgcccaccgtgaaggagccgaactcggtgaagatgttgggctcttcagtgtcgttgcgctggcagatgttcttgatctgggcgatgatctcttcggtcaggtactcgtagtcgtactcgaagttgagcgagttcttgatcgggaatccgccgccgatgttgaggctgtccaattcggggcagatggccttcagctcgcagtagacgttgatgcacttcgacaactcgttccagtagtaggccgtgtccttgatgccggtattgatgaagaagtgcagcatcttgagctggaacttcttgctgttcttgagtttggccttgtagaagtcgatgatgtcgttgtagcggatgcccagacgcgaggtatagaactcgaacttgggttcctcctcgcaggcgatgcggatgccgaccttgcatttcttggtgaacgaatcctcgaacagctccagctcctccttgttgtcgagcacaggaatggtgttcacgaagccgtcgttgaccagctgggcgatgttctccacatactgcggccgcttgaaaccgttgcagatgatgtagcggtccttgtcgatgattccgctgtcgtagagcgcattgatgatatgaatgtcgtatgccgacgacgtttcgagatgaatgtcgttcttcattgcctcctccagcacgaacgagaagtggctcgacttggtgcagtaacaatagttgtacgagcccttgtagtccaccttggccatcgccacgttgaacatacgcttggcccggttgatctgctgcgagatcttcggcaggtaggttatcttgagcggcgtgccgtactgttttatcaactccatgagcggaatgtcgtggaaattcagctcgttgtcttcgaccgagaactcatcctgcgggaagtcgaacgtctgttcgatgaggtcgatgtacttgtccttcatggctcgtttgtcgtggtttttacaatccgtcccgtctacatccgaaattttcgggcaatgtagctcgcccggattttccgaaaaaacgggatgcaaagtaggcgaatatttttcgtataaccaacactttgccggattattttgaaaaactcccccgaattttggttttttcttcgaaaaaaggtacttttgctgcaaatttcaagcaagatttcaatcgtgttgattcgcaccatatcgcaatatcttgagtcgcacaaacggctcgtcgttccccagcttgggacgtttatcgtcaaggagccgggcgtaagcatcgttttctcggaacttctgaagcgtgacgacgggacgctccgccgtctgcttatcgacggggggctgagcgaactggaagcggcgggggagatcgaccgcttcgtcttcgaggtgcgccacgccgtggagcacggcgccgaattccggctcgacggtttcggcgtgatgaggcccggtcccaacggcaccatcgccttcgctttcgaatcccgccgtgcggagtccgcatccggcgcatccggacttcccggtgcggccgcggcgtccgacggacagccgaagcccgcccgccggccctacgacgaaccccgcatttcgacttcggccaagatggctcccgatccttcggtgcgcggcctgcgctacggcaagccgccaaaaaacaccgacgcctatacttacgtcgaccgtcctccgcgccgccgcaaggcggaccgcttcatctggatcgccctgatcgccgcggccctcgccgtcgcggccatcgcgttcggctatctgcgcgaggcgaaggaccgggagaccgagatgcagtacctcgaacagcctgccgacacccataccgcggcgtccggcgatgcggcacaaccagaacaacccattacggaataaatgacggatatcaccacagtcaaacaacgcttcggcatcatcggcgcttcggaacttctggaccgggcgctggaggtcgccgtgcgcgtggctccgaccgacctgacggtactcgtcacgggcgaaagcggcgtgggcaaggagtttttcccgcaggtcatccacgcttactcggcccgcaaacacaataaatatatagccgtcaactgcgcggccattcccgaaggcacgatcgactcggagcttttcggccacgagaaaggctccttcaccggtgcgctcgaagcccgcaagggctacttcgaggaggccgacgggggaacgatcttcctcgacgaggtcgccgaactgccgcatccgacgcaggcgcgcctgctgcgcgtgctgcagacgggcgaattcatccgcgtcggttcgtcgaaggtccagaagaccgacgtccgcgtcgtcgcggccacgaacatgaatttgcagcaggccatcgcttcgggccgcttccgcgaggatctctattaccgcctgagcacggtgccgatcaccgtcccggcgctgcgcgagcgtccgcaggacattccgctgctgttccgcaaattcgccgccgacgtggccgtgcagtaccgcatgcccgccgtgacgctcgatcccgcggcgcgcgagatgctgatgcattattactggcggggcaatatccgccagctgaaaaacgttgctgaacagatatcggccatcgagcagacgcgtctcattacgcccgacgtgctggccaaatacctgccgccgcagggcgggggcgctcccgtcatgatgggcggggcgccggtcgacgatgcgatgtccaccgaacgcgaactgctctacaaggtgcttttcgacatgcgcgccgacatcaacgacctgaagcggatgatgtccgagctgctgcacaacccctgtcaggagccggtccgcgacgtcaaggcgctgctgtcgaccacggcgcaaagctccgcgcccgtctatgcagcaggctcggttccggtcttcgccgagagcgaggaggtgaccgacgagccgccgcgcgagatgaccaaggctgacatgcagcgcgagcagatcatccgcgccctgcgccgcaacaacggccgccgccgcgaagccgccgccgagctgttcatgtccgagcgcacgctctaccgcaagatcaaggagctgggcatcgaagagaactgacggccctccccggatcgtccggcggagtgcactgaaaataaccggttccgaaccggagtaaaacgatagaatttcggcatgaagataaaattcgcaatcacggccctttgcgccgccctgctgacgggctgcggcgtggccatcaaatattcgctttcgggtgcttcgattccgcccgacgccaagaccttcagcgtggcctatttccccaacaacgccacgatggtcgcgccgatcctcagttcgacgctcaccgatgcgctggtcgacatgttcacccgccgtacccgcctgatgcaggtcgaggagggcggcgacttcgccttcgagggcgagatcaccaactacatgtcggcgacctcgtcggtttcgaccgacgactacgcggtgctcaaccgcctttcgatcaccgtcaaggtgcgcttcacgaatgcgctcgacgaaaaaatgtcgttcaaccggacgttcacggctttcgaggattacgaatccacgcggctgctctccgaggtcgagggcgagctgatcccccagatcgtcgataaactggttacggatatttttcaggcttcggcctccaactggtaaaacctgcgcggcatgacggatttcagacaatacctcgcatcgcccgccaccgcggagcgcccttccgccggggagctggacgccctcgcggcgcgttacgaatggttcgctccggtccgtatcgcacgggagatcgtaaccgggatatgcgatccgcggctggccgtcacggccccgtggcgggcgcagagttcgctgctgcgccgaccgatcgacgcggaggccgtcctgcggctttcgtcggacgacatcatcgaccgctttctgcaggaggacgacctgcgcatcgtcgcggccgacggcgaaccggaggaggaggtccgcacggccgccgagctggacgacgacgacgaggtcgtgagcgaagagctggccgaaatctatctcgcgcaggggctttgtgacaaagcaatagcgatttatcgcaaattaagtttgctaaatcccgaaaaaagtgtttactttgccgagctaattggcaaattggaaaacaataattaaaattcaacgatatgttatacacgatttgcattgccctgatactcatcgcgagcgtattgatcatccttgcggtattggtgcagaaccccaagagcggcatggccgccaacttcggcgcgtcgaaccaagtgatgggcgtgcgcgagacttcggactttttggagaaattcacgtggacgatggccattgctatcgtcgtgctgagtctggtcgctacgctggctatggacaaaggccttgtcgccgagagcaacagcgagatttcgaaggacgttaaggcgcttcaggagcgcgttatcgagtcggaaactcctgccacgatgccgcaggccgagattcccgccgccgaagttcccgccgagcagtcggccgaataggggctgggtttcagccggacagtgccggccgcgaggaacggggttcccggccgatgcgggtgctgtctgatattttacaagccgtggattttccacggcttttcgtttttcccgtattcggtcgtacgtcctgcgccgaagtattgtcgggtgcaggacaatcgctcgaatccaaaatcggttattatgacaacggaaagtggaataaagtattttgaaaaccgcgaggagtggcggagatggctgactgacaatttcgatacggcccgtgagatatggttcgtgtttccgcataagtcgtccggtaagaaaagcatcgtatataatgatgcggttgaagaagccctttgtttcgattggatcgacagcacgataagacccctcgacgcagagcataaaattcagcgtttcacccccagaaatcccaaaagtccttactcgcaagccaataaggaaagacttaaatggctcatggacaatggaatgatacacccgaaattcgaggagaagatacagaaggtgctttccgtcccttttgtatttccggacgatatcatcgaccggctgaaagaagatcgaacggtctagagaaactactgccgttttccggaaacctataaacgcatccgaattgcctatatcgaagctgcgaggtcgcgtcccgaagagttcgggaagcggctgaaccacttcatttgcaagacgaaggaaaataagacgatacggggattcggcggaattgaaaaatactattcgaaataaaattccggtgcatggccggacgggctgcccgctcttgcggctgcctgttgagccagccatccggccgcttccggttttctgcttccggttcttcgtttctgttttttccgctctattctttcttctatttctccgttccgatcaggtagagcacatgccgtcgcaggggatggccttcgggcagggcggggtggtcgaactcgcacaaaagctccatgccgagcttctgcatgacccgctgcgagcgcaggttcgtgacggtcgtgaaggctaccagttcttcgatgcccagctttgcggcgagcgctacgcaggcctgcgccgcttccgtcgcataaccctgatcccagaactcggcccgcaggcgccaaccgatttcgattttatccttcatgcccgtaaacgttacgcggtgcagccccgtataaccgagcagctcgccgtcctcgcgccgctcgacggcgtacaggccgaatccctcggtcgagaactcctcgcgtatgcgttccatgaattccgccgactgctccggcgccagcggtgccggaaagtactccatcacgcgcgggtcggcgttcatggccgtaaatgttccgaggtcttcttcccgccatgcgcgcagcacgagccggggtgtaggtgctggaaaaatcatttcgcaaattctgttttgaattggtggatgtagataccgtattccgaatgccgttcggatctcggcttcgcatcgcagccggttccgccgccgtgtgttttccggaaccggatcggctgcttccgattgcagttgtctgccgggcgtttgccgctcccggccgcggacatttgtccgcctctttttttattcggtcgggacttctgtcctgccgtttttcgttttgtcgggagccgtccgctcttcaacagcgtccggattcagccggcccggtcgtccgctcttctgcggcccggaggaaacagccctccctttctgcggccctactcggccacctcttttttcgaacgcttgcgggtgttgatcgtcagatagcgttgcagggtctgctgcaaccgtaccggatcgatgtcacggcgcagttcgccgctctgtgcgatcgaaatgccgcccgtctcttcggaaacgacgatgatgatggcgtccgaaatctcgctcatgccgatcgcggcgcggtggcgcgtgccgtacgatttgggaacgtcgctctgcgttacgggcaggatgcacttcgcggccacgatgcggtcgccttcgatgattgcggcgccgtcgtgcagcggggcgttcttgaagaagatattgcggatcagcggcgtcgaaacctttgcgtcgagtgcgatgccgccctcggcgatcagccgcaggtcgctctgctgtccgatgacgatcagcgcgccggttttcgtctccgacatctcgcggcaggccgtgacgatcggcacgacgttggtctgcaccgcatcgtcgcccgtcgagaagatgcgggtgatgaagttgaaatgtttctggcgcatgccgatcatctgcaggaaacgccgcagttcgggctggaagacgatgatcagcgcaatggctccgaccgaaatcagctgtcccagaattgtggagagcagttccatgttgagcgtccgcacgacgacccatagcaggtagatggcgatgatgcctgagagaatatagggcgcgttggtgcctttggtcatgcggtagatccagtacatgatcacggcgaccagaatgatgtctatgaaatcgacgaatgtgaacggaacgaaacccattgcgtgtgcgttgctttttagttttcctgcaaatgtataaaaaaatacggacttttcctcggtcgggcctcaataagtcgtgccgatgtgctgccggcctgccggtcgccgcagcccggcaggcatgtttcggcggttccccacgcaggcgcgtccacgaaaaaagccgtcccgcaggggacggctcttattcatgcagcggaaccggattgcttatttcttctcggctttctggtcggccgcatacagctcgtttaccttcgccagcacggcgggggtgatgttgagcgtcgtgtcggcgtcgataagggccgtcgagttgatgatcagcttgtacttcttgccggcgttgatatcctgcacggcgcggtgcagcagatcctgcgcccggttggtgaatacgaagttctcttcgtcgagcgcctgcgcctctttctgcgccgaggactggtaggcggccacgcgcttttcgatgctctgctgctgggcctgcgcgtcgttggtcgtaatcagtcccttctgatacttctcctgtaactgggcggcttcggactgaaggttctgctccttctgcgcccagctcttctgcgccttctgggtcttctcctgcagggccttgccttcgttcaggaaaagatcgcactgagccagcacggcttccacctgtacataggcgatgtcgcttgagccgatttcgcgggtcgcctcttctgcggcggccgccgtctcagtggttttcgtaccgcaggccgtcatggcgcaagccgcaacaagcgccgtaaaaagcatttttttcatgtcgttttttatcgggtttagttaaatattccgcttttgaatcacaaaggtaaaaaaaaatctttatttttgccccacgccttgtaaattttgactccatgtatgaatacatcagcggtccggtggccgaagtcgctcccgcatacgcagttatagatgccggcggggtaggttattacctccatatctcgcttgaaacgttttcggccatcgagcacaccgagacggcccgtctgtacgtccattacgtcgtgcgcgaggacgcgcagctgctctacggtttcgcgaccaaaaccgagcgcgaactcttccgccatctgatcagcgtgtcgggcgtcggcggcaataccgcccggatgatcctttcgacctattcgccgcgcgaattgcagggcatcatcacttcgggcaacgccgtgctgctgaaaaacgtcaaggggctggggctgaaaaccgcccagaaaatcatcgtcgagctgagcggcaagctcaccggactgggcgacgccgacgccgctcttccggctgccggcaacggcgaaaagctcgaagaggcgctcgcggcgctggtcatgctcggctttgccaaaactgccgccgagaaggctcttcgcggcattctgcgcgaaaatccgggggcttcggtcgaggatttggtgcgaatgggcttaaaaagcctatgaaaagtcttttttcatcaacgaaatcgaataattcccccccccgtttgtttggtttggtaagatatttgctataccttcgcacccgttacttgatattattgatttatggaagaacaaatccctcttggctttatcggtatcctgctaggggtgttcgcctttgccttcctgatcggtgtaggcgtcatatatctgaagcaacggcgaattcaacgtctcaaaaatccccggaaagactattatcggtagcataatcgacggcttcggccgtcttttttttgccccggcatgctaaccggggctttttttgcgtttcatgctgtaaaatcggattgtttttgtaaatttgcacgattatacgacgatgagcagagttttcatatccatattcgcggcgctggtgctgctggccggatgctccgacgaggaggacatcctgcccacgcagaagacgaagatcgtctcctacctgaccggcacccattcgcccaagctcgtggcctatgaggagctggaggaggggagcgacgagccttacttcaccacttcgggcaacgcggtctaccgctacatcgcggggatcaacaaccccgaccgcgtgaactggaccgaggtgacgcgcacctcgaaggtgaccgtcactttcagcgcctacgtcttcacctttgccaatatcgtgacgcccgcgacgtccaccaccaaccttacggtgccctattattcgaacgatccggtgctgatcgcggcgatggaagatcccgaaaacggtcccggtctgacgccgggcgcgtggtcgtccgaaccgctggagatagatatgcgcggttccggcataataaaagggctttacgaagcgttacttggttgtcgtgagggcgactatgtcgaatcctacatgacctacaatatggcttacggcgacatcaacttcagtacgatcccgaaggagagtcccgtcgcttatttttttacggtaaacagtgtcgagtaaaatacaaaccgaaaatatgaaatttattacccgttttttatgcgtgccggttgccggccttctggcgctgacatcctgtgcgaaagacgaagacgaatcgtacgttcagttcgagaatcaggcgctcgaagcgtggatgacccagcaccgtcccgatctggtgaagaactaccagcccgacggcggttattatatcgacgtactcgatgccggggagccggataaagatccgctcaacaaggagccgatctgggtgtcgttcgacttcacggggcgcgatctggccggcaatattatcctcacacgcagtgcatccgacgccaagctgacgggcgctttttccaagtatacccattatgtgccgttttaccgctattgcggcaccgaaaatacgggactgatggagggcacgtggctggccatgcgcaacacgctgaaactcgaccaggagtatttcgacaagtataaaaacgatcccgagcgccgtctcacctctaccgagctgcagctccgcatcggctccaagatacagctttacatgccctctaccgtcgtcggcaacggcgtcgagggtacgggaggctatgaagggcagggttctccgagcaaatatacgctgagcgccaaccgtccgttcattgtcacgatggagatccgcgatacggtcagcaaccccctcgaacgcgagggtaaaaacgtggacgaattcagcgacggcaacggcggccggctggtctacggcaaggaagccgacgaaaagacgcaaaccgtcgttcgtccgaccgatcccgaagacccgaaccacgcctatgtgaccgacaaacgctgggtcagcgcctgcgataccattccgcagctctatgtgaacgtgcgctatgatccgacgcaggccgcagaccggctggattatccggctccgtaccactcgggatacgaaccctatgtgaccgaagagtccgtaaaaacgatcgatgagaagatcgccgaagcgctgaaaaagcgtttctatcctgacgacgacgataaatacgaaggcgtcgtgaagctcgacgccgattcggtgacgctcgaaggtacagccaaaatctggtatatcgggcgtttcctcgacggctttatcttcgatacgaatatcgacgaggtgaagaagatcatttacggcgaggtcaaatccgccggttcggcgctctcctataagccgtcggaaagaaagatgatcgaagccttccactacacgattcccaacctcaagtacggccagtgggccgagctgatcaccacttcgaccaacgcctatggctcgtcgggcaagaccggatcgaccagctcctccacgtcgggcacgagcggttattcgtcgagctattacgattacctgaactacctgaattacgccaacagctattacggcagcggcggctattacggcggttactacaataactattacggcggttacggcggctactacggcggttattacggcgacatgtacggcagcgactacaacagctccagcacgggaactacggtcaagaccatcaataccgagattccctcgttcacgccgcttattttccagctttacatcgagccgaaggagtaatccggcgccggatacgaaaactgaaaccgcactttccgtcgggaaagtgcggtttcttttttattatctccccgtttcgtttttattacacatttttaaggcagaaattttgcagttcaccaaaaatgtattaacttagtgatgcagaacttcaacttaaaattcaactgatatgattatcacatttaacgagttgcgccgtatcaaggacagactgcccagcggcagctcgcagcgcattgcagatgagttaggaatcgatgtagacaccgtccgcaactatttcggaggcaagcacgaggcgaaagaatgcgtgggtgtccacttcgagtcggggccggacggaggcgtggttacgctggacgatacgacgattctcgacgttgcgatgcgtattctgggcgagcagaaataaatattgtatgccggccttcgggccgtgtcgtcgggcctgcggttgcgcaggcctgttttttttgccgcctgactccgctgtcctgtctgtcttcgttgcatcgctctttgcgctgtcttccttcctgtcttacgttttcctcttgccggcccgtagctccctctgcccgtagctccctctgcccgtagctccctctgcccgtagctccctctgcccgtagctctctctgccggcagctcgccagctttgtcggtccgtcctccggcgtctgtattccgtctggtttttcttccgccattccttacttctttcgcccgccgtccatcgccgtccatcgccgtccatcgccgtccatcgccgtccatcgccgtccatcgccgtccatcccctcgccgcctgttgtccgtcgcccgttgcgccgtccatcgtccagcgcttgccgtttgttgtccgtcgcctgtaccccgtcgcccgccgccgcacctctttccgttgccgttcggtccggaccacggcttttgtatccgcggaatcccggcctgcatgtctgcgggagctgcttgccgtgtcgttccgcagcggttccgtcggtctgcctttcctcgaaaaagcctccgccttccgcagcttggtcgccgcgccgtttctgacaaaataacaccttgcgtcctgctttccggggcgatattcccggcccggtctgccattctgctgacaatttggcagagattgccgtttggtacaacctttgttcaaattcaggacgtgaccggcgctccggacccgcagggcggaagaactccggcggcacggacagaaaacggaaaaaatataaacaattaaactcatatacgattatggcaaagattattggtatcgacttaggaactactaactcctgcgtggcagtgatggaaggcagcgagcctgtcgttattcccaactccgaaggacaccgcacgactccgtcggtagtggctttcgcggcggacggcgagcgcaaggtgggcgaccccgccaagcgtcaggctatcaccaaccccaaacgcacggtcttctcgatcaagcgtttcatgggcgagcgttacgatcaggtggcctccgacatcgcacgcgctccgtatgaaatcgtcaagggcgacaacaatacgccccgcgtcgatatcgacggacgtcagtacacgccgcaggagatttcggcgatcatccttcagaagatgaagaagactgccgaggattacctcggacaggaggtttcggaagccgtcatcacggttcctgcctacttctccgactcgcagcgtcaggccaccaaggaggcgggcgaaatcgcaggtctgaaggtgcgccgtatcatcaacgagccgaccgctgccgcactggcttacggtatggacaagaagaacagcgacatgaagatcgccgtgtacgacctcggcggcggtacgttcgatatttcgatcctcgaacttggcgacggcgtcttcgaggtgaagtccaccaacggcgatacgcacctcggcggcgacgacttcgaccacgtgctgatcgactatatggccgaggcgttcaaggccgagcaccagatcgacttgcgtcaggacccgatggccctccagcgtctgaaggaggccgccgagaaggcgaagatcgagctctcgtcctcgacgacgacggagatcaacctcccgtatatcatgcccgtaaacggcattccgcagcacctcgtgatgtcgctcacgcgtgccaagttcgagcagctctgcgatcacctgatccgcaagaccatcgaaccctgcaaactggcgctgcgcgacgcggggctcgacgcttcgcagatcaacgaggtgatcctcgtgggcggttcgacccgtattcccgcgatccagaagatcgtggaggagttcttcggcaggacgcccaacaagagcgtgaaccccgacgaagtggtggccatcggcgccgcaattcagggcggtgtgctcacgggcgaggtcaaggacgtgctgctgctcgacgttacgccgctgtcgctgggtatcgagacgctgggcggcgtgatgaccaagctcatcgacgccaacaccaccatcccgacccgcaagtcggaggtcttctcgacggctgccgacaaccagccttcggtcgagatcaacgtttgtcagggcgagcgtccgctggcccgcgacaacaagtcgatcggccgcttccacttggacggcattcccgccgcaccgcgcggcgtgccgcagatcgaggtgacgttcgacatcgatgctaacggcatcctgaacgtatcggccaaggacaagggtacgggcaaggagcagaagatccgcatcgaggcctcttcgggccttaccgagcaggagatccagcgcatgcgcgacgaggcgaaggccaacgaagcgaaggacaaggaggagaaggagcgtatcgacaagatcaacgccgccgactcaaacatctttgcgaccgagaaacagctcaaggagtacggcgacaaacttcctgccgacaagaaatcggcgatcgagggggctttggccaagctgaaggaggctcacaagaacgccgacgtcgcggctatcgacacggctatcgctgaactgaatgccgcatggcaggccgcttcgcaggacatctacgcccagcagcaggcgcagggcgcccagcccggagccgatgccggccagcagtcgcaggctaacgccggcaatgcgtcgaacggtgacagctcgcagcctgaggacgtcgagttcgaggaggtgaagtaattccgaagtgttccgaacacttcagccgtaaggctcacatatatttttcgagatgcggtccggatttccggaccgcatctttttttgctattttccgactgtcagttccacgatgcagtccgctcccgcaggcttttcgcccaagcgcagcgtcacgcccgccttgtcctgcgagaaggcgaccgcgcgtttgtcggcgaagcgtaccgcctgccggatgcgttcgtctctgacgggcacgaacagctcttcgtcgggccagtcgagaatgtgtacgtagattttgtcgccgcggcgcgtggtcacgccccagctgcgcgggcttacgggtcccgcctgcgtgccgtagatggtttcgccgttcgcgcgcagccagcgtcccatgctgtcgagccgttcgagagccgccgcgggcagcgcgccgtcgggctggggaccgatgttgagcagcaggttcgcgccgcgtcctgcggcccctgcgagatagcgcacgagcgtctgcgccgatttgtaattttggtcggtgatcttgtatccccacatgccgttcatcgtctggcacgtttcgagcggcaggcggctgatctcctgccccgaatatccggccgtgttctctcccggcaggtcgcgttcgaacgcctgcgcgtcttcgccttcgaacggtgcgagatggtggttgttgatgatcaggcatccgggctgcaatttgtgtatcagcccgtagagttcgcccagccgccagtcgaaaccgggattctcgtcctgatcccagatgccgtcgaaccagatggcgcccacgtcgccgtattgtgtcagcagttcggtgagctgcgccttcatgaagccgaaataggcgtcggcgtcctccttttcggccgggcggcccgtgccgagtcccgtccggccgcgcggggcgtcttcgcgccaccagtcgatcagcgagtagtagaagtggacgcgcagtccgcggcggtgacacgcgtcggccagctccttcaccgcgtcgcgggcgaaaggcgtggcatcgacgatgttgtagggcgtctgcgccgtgcggaacatcgagaatccgtcgtgatggcgcgtcgtgaagcagacgtagcgcgctcccgcttggcggaaagcctcggcccatgcgtccgcgtcgaatttcgagggatagaatcctcccgcgagcttttcgtactcccggtagtagaggttgtggttggtcatcgcccattcgccctgcgcgagcatggcgtaaagcccccagtggaggaatatgccgaaccggcagtcggcgaattggctgcgcgacaggaggttttccggggccgggcggtagccggcctgtgcgaaggcgcccgtggcgatcacgagggcgcagaaggaggtgaagagtcgggtcatggtgacggtcgggtttggtgatacggacaaatttagcaaataatttgcaatccgcacaatgccgccgccgtcggatgaccggaacgaagggccggacgctccgccgcagggacggagacggtggcggggttttctattccggctccaccagcacgtcgacgctcagcccgaccccggccttgcgcatcttccacggcgcctgactcgtgtcgcgggtgtaggtgcgcgcgagcagccgggcgcgaatccagtatttcgcccccgccggcatgtgtgtcaggttctcgaccgagatcaggaagtcgcctcttacgaatatctcgtagggccgcaggtctacggtcgtcgtcttgtcggcctccgacgccggaaccgagaaatagaccggttccgcgagcaggtttttgcggatacggtcgccccgcatggcgtagacgtttatgcgcatgtggagcgtgtccacgcccttgcatcccgccagattgagccgcacccgctgcaactcaccccggagctctccgagcttgcatttcacgcccatctcgccgccttcctgcccggcgcggaacgccgcgctgaaacggttttgctgccgatgctgcggccgaaggtatagcgtttgcggggaatatgggttatcacggggctcagcggtgtctggggctgctcctgcagccgtatctccagcggccgtgcgtcgtgtccggcggccggaatctcccgtgcggcatacccgatgcaggatatgcgcagcgtgtcccggacgctcaggtcgggaatgcggagcgtaaacgagccgtcccgttcggatacggttcccgcggggcggttcttgagtcctatgttggcgtaggggaccggtcgggcgtccgctccgacgatgcgtccggagagtgtttgcgcctgtatcggcagggccgcgaatgcggcgcagacgagtaggaatttcagcatgctgactttgcgggtttatcacggaacgtcgggccgtgggattttattgcccgatgcgggccgccgttccgcccgccacatgccgtagaggatcagggccgctccggcgaggccgccgcggtgatccgttcgccgatgcagagcgcggccgtgacgatcgtgaccaatgggttgaaatagatatagttcgtggttcttacggctccgagccggtgcatggcggcgttccacaggatgtagcagagcatcgacgcgatgatgcccagaaacagcaggttgccccacaccgcgggacgcgccagtacctccgcgccgaccgagaagggctggaaggcgaataccggaagaatcgtcagcagtccgtagaagaagaccttgcgggtgatgaaaacggcggggtagcgccctccgatgcgtttgaccgccagcgaatagaccatctacagcagcgccgcggacagggccagcagatcgcctttgggcgagaggtgcagcacgaaacggtcgttgagaaccaccagcaccatgcccgcgaacgccagcgccgatcccccgatctgccgccgcgtcatccgctcgccgcggtatgcgaggctcagcagcagcgcggtccataccggcgccgtgcagacgatcagcgacacgttcgacgccggggcgtattcctgcgccatgttttcggtcaggaaatagaacgatccgcccgtcaccccggccgcggccagcagcgcttcgtcgcgccatccgtcggcccgcaggcggcctttcgacaggggccagatgcagacgtaggccaaggcgaaacgcagcaggaatatctccgcaggcgtcagcgaatgggcgatcagcaccttcgtcgatacgaacgtcgcgccccataccgccacggtgaacagcgccgctgcatggtacttgtattcggtatattttatcatacggtcccaaaaatacagattttttgccgtccgggcgcaaatcttaattcttaatttccgattttcaattcttttttcctatctttgcgtgctattgtgcgtaatgacaataattacaacaaataataacaaaatttttcaactcaaatgcaaagtaaaggtgctattaaattactcgcggtccttttggctcttgcgtgtatttaccagctctccttcacgttcaaaacgcggagtgtagagaaaaaagcggccgagtacgccgcgcagttccccgtcggacagcagtccgaggcggagcagcattacctcgattcggtccagaatgtcggggtctataacctcggattcaagaaattcacctacaaggagtgcaaggagaaggagctgaacctcggtctggacctcaagggcggtatgaacgtcatgctggaagtgcaggtcgaggacgtcatcaaggcgcttgccggcgacagccagaacgaccccgcattcgtcgaagccatcgccgaggcgaacgccgcgctgaaggagggcacctcgaaagactatatctccgacttcgtgaaggcttaccagcgtctctccaacggcggttcgctggctgcggttttcgtcagccccgaccgtaaggacatcacgctcgaaagctccgacgccgacgtcgagaagatcctcaaacgcgagaccgacgccgccatcgccgcgtcgttcaacgtgctccgcagccgtatcgaccacttcggcgtcacgcagcccaacatcatgcgcctgcccaactcgcaccgcatcctcgtcgagctgccgggcgtgaaggagccgcagcgtgtgcgcgacctgctgcagggtaccgcctcgctcgaattctggctgacctacgacgcccgcgaggtgcttcccgcactggccgccgccgataagttcatcaaggccgagctgagcgaagctcccgccgcccaagagcccgaagtcgcttccgtcgaagccgctgccgccgccgggactcccgcaggcgaagccgagggccttctcgccgagatcggctccgacaccacggctgttgccgaagccgagcacaccgaccgttacgaccgtgcgaagaacccgctcttcgcggttctcgatcccggttttgcgggcggcgccgccatcggtgcggcctacaaggccgacatggctgccgtaaacgaatatctggccaatcctgcggtccgcgaactcttccccgccgacatcgccttcaagtggggcgtcaagggcgacgacaagatcgacggccgcttctacctctatgcgatccgcatctcgacgcccgacggtaaggctccgcttgacggcagcgtcgtgaccgaagcccgcgagcagtacgcccagcgcggcgccaacgccgtggtttcgatgtcgatgaacggcgaaggcacgcaggagtgggcgcgtctgacgggcgagaacatcggcaagtgcatcgccatcgttctcgacggctacgtctactcggctccccgcgtgaacaccaagatcgacaagggttcttccgaaatttcgggcgacttcaccattcaggaagccaaggacctcgccaacgtgctcaattcgggtaaggttcccgcgcccgccaaaatcattcaggacaccgtcgtaggtccctcgctgggacaggagtcgatcaatgcgggtatgctctcgttcctgatcgccttcatcctcgtcctgctctacatgggtctgttctacaagaccgcaggctggatgtccgacatcgccctgcttaccaacgtcttcctgctgatgggtgttctggtgtcgttcggcgccgtgctgaccctgccgggtatcgccggtatcgtgctgacgatgggtatggccgtcgatgccaacgtcatcatctacgaacgtatcaaggaggagcttcgcggcggcaagggcctttcgctggctatcaaggacggtttctcgaaagcctactcggccatcatcgacggtaacctgacgaccatcatcaccggtatcgtcctcttcatcttcggcaacggtcccgtgcagggctttgccacgaccctcatcatcggtatcatcacttcgttcttcagcgccgtgttcatcacccgtctcttgatcgagtggatcgtcgccaaatggggcaatatctccttctcgcgcaagtggtccgagaacttcctgaccaatacgcatttcgacttcatccgcgtccgcaagctcgcctacaccgtcgcggtcgccctgctcgcgctgtcgtgcatctcgttcgtcgcccgcggtctgaacctcggcgccgagttcaccggcggccgtgcctacgtcatccgcttcgacaagcccgtttcggccgaggaggttcgtcagaatctgggtcaggtcttcgcgcagcacgccgacgccgacgcttcggcgatcagcttcgaggtcaagcagtacggcaacgagaaccagatgcgcatcgtgacgcagtaccgttacgacgatacgtcggacgaagctacggccgaagtcgagcagatcatctacgacgccatgaagtcgctctactcctacgacatttcgttcgagcagttccgcaatacccagaccgacgtcaacggtatcctgacggccgacaagatcggtccctcgatcgccaaggacatgacgtggaacgccatctactcggtgttgttctcgctcatcgccatcggtctctacatcaccttccgcttcaagcgctggcagtgggcttcgggcgccacgatcgccctcgcggtcaacgccctgttcatcatcggtctcttctcgatgctctacggcttcgtgcccttcaacctcgaagtcaatcaggccttcatcgccgcgatccttacgatcatcggttacgccatcaacgataccgtggtggtcttcgaccgtatccgcgaatatctgggcatgtatcccaagcgcaacctcaaggagaacgtgaacaacgccatcaactcgacgctgtcgcgtacgatcaacacttcgggcacgacgctcgtgacgctgctggcgatcttcttcttcggcggcgagaccatccgcggcttcatcttcgcgctgaccgtcggcgttatcgtgggtaccgtcgcgacgatcttcatcgccaccccgatcgcctacgacctgatgtccaaacgcgccaaattcgacaaggaggcgtaatacaccttatatctattcgaataaaatggactgcacggtttgttgcagtccattttatttttacctttgcatcatggaacttcaacgcacaatggataatttgctgaaatggatgcaccgctacgtctcgccggtctttcttgcgctgctcgtcgcgtcgttcattttgtggtatatcgccaaactgagctatacctataccaccgagcaggtcgtgcgtgtgagtgtggacggggagcctttcgaggtgacgtgcgtcgtcgagggcgtcggcaccaacctgttcggctaccgggtctacatgaacaagacactgcgcatcccgctctcggaactcaaatacaagcgttcgcgcgaggaggggcacgagggcaaggtggtgatcgacccccagtcgttgcagagcgccatttcggtacgctacagcgatatcaaggtggtctccatcggcgctgttcccgaactggattatcccgaagagaaaccatgatgaaaatcggagtaacgggcggcatcggcagcggcaagagcactgtatgccgcctttttgcacaaaagggcattgcggtttacgattccgacgccgcggccaaacgactcatgcagcaggacgacacgctgcgtatgcggctcaccgaacgtttcggagccgacaccttccgcgacggacagctcgaccggagccgcctcgcaggcgttgtcttcagcgatccgcaggcgctcgccgacctcaatgcgctggtgcatcccgtcgtgatggcggatttcgatgcgtgggccgcccggcaggaggggccttacgtgattctcgaaagcgcgatcctgttcgaagccggtctcgaaacgtgcgtcgacaagaccgtcgcggtcctcgcgccgcgcgaactgcgcatcgagcgcacctgccgccgcgacgactgcggtcccgatgaggtaggccgccgcatcgccgcccagctggacgacgatacgctgagcggccgtgccgactacgcgatcgtcaatatcttcgaggaggacctcgaacccgccgttgtcaaactcgaccgcatattcagccatgaagcagcacgacattgatctcgacctctcccggccgcaggtgatggcgatcctgaacgtcacccccgactcgttcttcgccggcagccgcatgcccgacgcgacgcatgtcgaacgccgcgtgaaggaggccgccgccgaaggcgcctcgatcatcgacgtggggggctattcgtcgcgccccggcgccgacgaagtccctgccgacgaggagtggcggcgcgtggagctgggcatcggggccgtgcggcgtctggcgcccggcgtcctgatttcggtcgataccttccgcagcgaagtcgccgcccgtgcgatcgaaaaattcggtccgctcatcatcaacgacatctccgccggggaactcgacccgcagatgcccgccacggctgcgcgctgcggcgtgccctacgtcgccatgcacatgaagggcgatccccggaccatgcagaccctcaccgactacaaacgcgacatcacggccgaggtcacggcctatttcgaaacgaagaccgccgacctgctcgccgccgggatcaaacgcgagaacattatcctcgaccccggcttcggcttcgccaagaccaccgaacagaattacgagctgcttgcgggcctgcactgtctctgcgcattggggtatcccgtactggcgggcctttcgcgcaagtcgatgatctaccgcgtcctcgacgccacgcccgccgaatcgctcgcgggcaccgtcgccctcggctgggagtgcctgcgtcagggggccgcgatcctgcgcgtgcacgatgtgcaggaggccgtcgatacggtcaggctcttcgacgcatacgaacggaaccgcaaataaccatcgcaaccgcatgataaaagttaccgacatacacaagcgtttcggcgacctcgaagtgctcaagggcgtctcgctcgacgtcgccgaaggcgaagtcgtctcgatcgtcggcgccagcggcgcgggcaagactacgctgctgcaaatcgtcggcacgctttcgcgccccgacgcgggccgtgtcgagatcgacggacaggacgccttttcgctgggcgacaaggcgctgtcccgcttccgcaacgaacgtatcggcttcgtcttccagttccaccacctgctgcccgaattcacggctttcgagaacgtctgcattccggggtttatcggccgccgtccgcgtgcggaggtcgaacgccgcgccgccgaactgctggagatgatgaacctcacgccgcgccgcggccataaacccggccagttgtcgggcggcgagcagcagcgcgtggctattgcccgcgcgcttgtcaattcgcccgccgtactgctggccgacgaaccttcgggcaacctcgattcgcacaaccgcgacgagatacaccgccttttcttcgagctgcgcgaccggctggggcagaccgtcgtgatcgtcacccacgacgagcatctggcggcgatggccgaccggaagatcaccatgtcggacggccggattctgtaatgccgcgttttatggacgacgaactgaaagagctgctcgaacggctccacgacaaatacaaccgccctgagtttatcgaggacgacccgatttcggtgccgcaccgctatacggaccgcgccgaccgcgagatcgcggggttcctcgccgccacgatcgcgtggggcaaccgcagggcgatcgtcacgagcggccaccgcatgatgcgctgcatggacgacgctccggcggacttcgtgcgcaatgcttccgaccgggagctggcgacgctcgaaacctatgtccaccgcaccttcaacggccgcgacctgcgcgatttcgtgctggccctgcgccgcatggaccgacgcttcggcggcctcggcgtctttttcgaggagcgctatgcggccgtgcagagtattccggcggtcctttccgaattccgccgcgaatttttcagctgcgaccatgcgctccgctgcgagaaacacctctcgtcgatcgacaggggcgcggcctgcaagcggctttgcatgtttctgcgctggatggtgcgccgcgacgagcggggcgtggacttcggccagtggacgcggattccgatgtcggccctttacattccgctcgacctccatacgggcgacatggcccgcgcgctggggctgctctcacgccgccagaacgactggcgggccgtggaggaggtcacggcggcgcttcgcggattcgatcccgccgatcccgtgcgctacgatttctcgcttttcggcgccggcatcgacggttatctgaaagagtgttgacgatgttccgcttcaaacgattcaccatacgtcaggaccgctgcccgatgaaggtcggaaccgacggcgtgctgctcggcgcatgggccggcgtgcggccttcggaccgccgcatcctcgacgtcggtacaggcaccgggctgatcgccctgatgatggcccagcgcgctcccgaagcccggattacgggcgtcgatgtggagaaggtctctcaggcccgcgaaaacgccgccgcgtcgccgtggggcggcagggtggcgttcgaacagtgtcccgtgcaggaattcgcgccggacgaacgcttcgacctgatcgtctccaatccgcccttcttcgtcgattcgctgacctgccccgacgagggccgcaccacggcgcgtcacgccgtgcgcctgcccttcgaccaattgcgcgacgcggtcgtgcgcctgctcgccgccgagggccgcttcgccgtgattctgccgacggacgaagcccggcgttttgtcgacgtctgccgcggattcctcgcgctgacccgctctacgggcgtacgcaccacgccacgccgtccggtcaaacgcctgctgatggaatttgcgcacgaaaacgcctgctccggcctgcgctccgattctcctcctgtctgctccgaactggtcgtcggcacgggcgaacacgagcagtacacccccgaataccgggccttaacccgtgatttttacctgaaattttgatagcacggcaaaataaattacatttgtatcagtgaataaaaacttcgagaccatgaaactcagacttctcgccctcgccctcgccgtatgcggcggcgcggcggcgcaaaatccatacatcgccctgcagggcgcgaacgaaaccgccgacggcatcgtcgtctcccagcctcgcacggtgctggccgtggacgtcaccgtcgagaaggacgtgaccctcagcggtccttacgcccgttatgcgcagaaattcctcggcgtccgcgctccgctcaccgacaagaccggctgggccgttaccggagccgccgtggctctgctcgatgccaaggcatgcctcgacgcacccgccccggccgagctttcgcgccgtgtcatgacccatgctgcgtccgacgacgaattcgcccgcctgcaggccgacaagaacgacatgacggtgctggcgctggaagacgccgcccgcgaagccgccaatacgatcttttcgctccgcaagcaccgtctcgaactgattacgggcgaagccggtgaaaacgtcttcggcgaaggactcaaatccgcccttgcggagatcgaacgtctggagcagagctatcttgagctgtttctcggcaaacgcatcgtgaccaccgaaacgcgccgctatgtggtttatcctcaggccgacaagaagcagtatatcgtctgccgcttcagcccggccgcaggtctgctccctgagagcgatctttcgggcgacatggtgctgttgcagatcgaaccttcgggcaacacctccaatgcgctcgaagcttcggccaaggagaccaacgtcgtcgcatgccgcgtggccgatccttcggtctgcacggtcatcgccggcggccgcgaatatgcccgtgcggtgctgcccctcttcgagttcggccgtacgatcaacgtggcgcttccccgccgcaaataatcccgtccatggacttcacgtcgcgtatggtggcgctgctcggcgagctgcgccgcgagcggaacggcgccgtcgccgatgcgatgcgctgttacggcgcaccgtacggtctcaactacggcgtgagcctgccgacgctgcgcaaactcgcgcgcgccgagactcccgaccacgatttcgcccgttatctttatttgcaggaggtccgcgaactgcgccttgcggcgctgcatatcgcccggcccgaatcgcttacgcccgatgaatttccggcatgggcggccgggatcgtcaattccgaagtcgccgaagaagccgctttcgctttcctgagccgctccgcagcgcttccggccttgttcgacgcatggatcgccgacccgaatccgctgcttcgatacgccgccttgcactccgccgcccgcagcgatcttcttacggcggcatggatcgcgcccgccgtcgaagcggtccgccgcgccgccgtatgcgccgccgaatccctctccaagcctgccgccgctccgctttccgcatcttcggccgcccgcctgatcgcgcagggggccgtcgcgctgctgtctgccgtcggcggcctgaacgaggagaaccggcaggcggtactccgcgcagccggttctctgggtaagctccctgccgaagactacgtccacgaggagcttacttggcgtctggaagcatagcttccgcctgtcagcgctgccccacctgctcgcgctgttccaactccctgagtacgttcgccagatggtcgtagccgatgcggccgctttcgcgccacagcacctcgccgcggcggaaaaacatcagcgtcggtaccgacatgatgttgtagcggtgtacgatttcgagcatgtcccggtcgtctatgtccaccttgtagacatccacgcggccgttcatcttctcctgaaaccggtctatgacggggtgcatcatctggcacggcccgcaccatgttgcgaagaaatccacgaacgtcagtgcgtcccgccagataatcttgtcaaaatccgttgctgtcatatttgtcgtgtttagttcatttccgcccatgtaagctccgtgtagaccttgtctgtcaactctttttctgcatagctgatcgtgcggcgcagcccctcggccagcggcgtgcggggcgtccagtccagttcgcggcgtgcggccgaaatgtcgggtatcctccgccgcgcatcgtccggacgtgccgcccggtgtacgatccgcgagcggcttcccgtcagggagatgatcttttcggccagcgcgcgtatcgagatttcgtggttgctgcccagatccaaggtgtgggtctgctccgaaggcgtggcttccatcatccgtacaagtccgtccaccatgtcctcgacccagcagaaggtgcgcatctgttcgccgctgccgttgaccgggatgtcgcggttctgcagcgccgccacgatcatcttcatcaccacgcgctggtccatgatgtcggccccgcttccgtatgtgttgaagatgcgtgcgatgcgtgcgtccacgcccagctcctcctgataggcccggtgcaaggcttccgccgcgcgcttgccttcgctcagaatgtactgccccgaatatcccgccgctggatcggtcgccggatcgcggtatcccgcgccgtatacgcagcccgacgaggcgaacaatatccgcgcatgctccatgcgcgcggtgtcgagggcgtttatcgtgccctgcatgttgatccggagcgtctcgacgggcagcgccttgttgtagcgcacgcgcgacgacgaagtgaggttgtaaatctcgtcgcagcggattccgaatgtattgatgatgttgtggtggacgtaccggaacagcggatgctgcagtacgctgcgcagcagcggcgaattcacggcgtcgcggatatcgacacaaaacacttcgtggccctcttccagaaggcgcagacagaggtgtgtgccgataaatcccactccgcccaatatgacaattcgcttttgcatcttttactcctttttgcaggagtacagagcaaaatctattccacaaagagcgcgcggggcagctgatcgatgctgtttatcgtgactatttcgattcctttgggacgtttgccgcccttgccgaggtagccggagacgatgatgcgtttgaaacccagccgtgccgcctcgctgatgcgctgttcggtccggggtgcggggcgcacctcgcccgaaagcccgatctctcccgcgcagcagacgccctcggccacggggcggtcatagtaggaggagatcaccgccgccacgaccgcgaggtccagccccggatcggcgaccttgaatcctccggcgaagttcaggaagacgtctttctgaaacatcttcattcccacgcgcttctccagcacggccagcagcatgttcatgcgcttggtgtcgtagcccgtggtcgtacgctgcggcgtgccgtacgccgcgccgctcaccagcgcctgcacctcgatcaggtaggggcgcacgccatcggccgaagcgcctaccgcgatgccgctcagcggctcctcgtagtgcgtgagcagaatctccgacgggttgtccacgccgcgcagtccgttgtcgagcatctcgaaaaccccgatttcgaacgtcgcgccgaaacggttcttgatgccgcgtaggatgcggtatatgttgttgctgtcgccctcgaactgcagcaccacgtccacgatatgttccagaattttgggtccggcgatggttccgtccttggtgatgtggccgatgatgaagatcgacgtgccggtcgatttggcgtatttgagcagcgtcgccgcgcattcgcgtatctgcgacacgcttcccgccgacgagtccagcaggtcggtgtagatggtctgtatcgagtcgatcaccaccagatcgggccggtgttcgccgatctggttgacgatgttttcgagcagcgtttcgggatagatcagacattcgtcgttgccgatgccgatgcgtcccgcgcgcatcttgatctgctcggccgactcctcgcccgaaacatagagcgtcttgagtccgttcgccgccagcgcgagctgcagcgaaagggtcgatttgccgattcccggctctccgcccagcagaatcagcgaccccggcaccatgccgccgcccaatacgcggttcacctcgctgttgccgaggtccatgcggcggtgttcgctctcgcggatgtcgcgtacgcgctggggcttggctgcgggcagggagcctgcgacattggccggcaccgagccgctttcgcgggcgacgatctcctcggtgaaggtgttccattcgccgcacgagggacagcggcccagccatttgggagcttcgaatccgcagtttttgcagaagtatgcctttttgacttttgccatcgcgtgtcggttaataggggtgcgacgtgtattccttccggatcacctgcgtgatgcccgcatcgggatagagctgtttgtactcctcggtcagatcgacgctgaacagcgttttgcgtaggtcgtcggtgtccgtatagcccgaaaccttgcaggtgtaggcctgttctccgaacgtgaagtgcagctcctccggtttgtccggctcttttatgaatgtgcccgtgacggtttcggcgtcggccgcaggccggacgacgagcggaccgccgttgtggtgcgtaaagtcgagccggtagctgccgcccgcctgcacgggagccttggccagcgcgtcgttccggatctcctccagcaacggattctccggctcttccggattctccggcttttccgtctgcgaagttcctgcgtccggattctccggatcgggattttccggatcgggattttccggatcgggattttccggatcgggattttccggatcgggattttccggatcgggattttccggatcgggattttccggatcgggattttcggggtcgggattctccggatcagggttttcaggatccggcttttccggttcgctcaggcttacggatatctcgatccgggcgacggggtaggaggtcgtgtagaagacgtccgaatcgtcgccgcaggccgtgagtgcggctgcgagaagcagcgctgtcagtattttcagttttcccatagtccgtatatcgctaaagtcccaaatcttggtcgatcagcaccaccagcacgcgcttgtccggccagcagcgcagcatctccatgcgggtgttgcatacccggtcgggcgaattgcagtccgaacatacgccggtcttggcgcagggcgtgcggaatccggggtggcgcgctatgttttgcggcgccgcgatcgtgcggatgcgctcttcggcctcgtcccggtttgcgacgatcttgttgcgtcccgccacgataatcaccttgcgaggcccgaacgccacgggagcgatgcggtttcccaccttgtcgagccagtggagcgtgccttctgccgtcacggcgttcacgcccgtgatgaagaggtcagacatcagcgcctgcctgcgtatttcgagccgctgcgggtacgtcatcgcggggtcgaatccgtccagcagcctgtaccttccgtcgccgcgcagccattcgatgacgcccgtggcgcgcatgctcatcgaatctccgaacgataccgtttccggccgttcggtctcgacggcggcctttattacggcgaaagcttcgtccgtgtcccggaccgtctcaacctcgaaatggtgccgccgcaaggcatctgcgcaatttgttattttcatcttattttatgaaaaaccggtatatgtcgttgccgttggcgtacagcagcagaagcaggatgataaacagccccacgtactgcgcgccctccagtatcttgtcgctcaccttgcggcccgtaatcatctcccagaacgtgaagatggcgtgcccgccgtcgagtcccggtatcggcagaatgttcatcacggcgaggatgatcgacagaaacgccgtcttcatccagaaatcctcccagttccagtctccggggaagatgctgccgatggcgatgaagccgcccaactcctcgtacatcttggtcttgggctgtacgatcatcttcagttgttcccagtaggacgacatcaccttgcccgccttgctgattcctgccggaatcgcctgccagaaggtgtatttctgcgtccggagcttgtagggattgagcgccgtcacgcccagtcttccctcgtccgacaccggaacgaccagctccagcagcatgtcgccttcgcgtttgacggtcagcgtcacatcctctcccgcatgggccttcaggtactccctgtaagcggggtattccagcccctgtgcatcgtttatcgccacgatctcgtcgccgcgcctgagcgccgacgccgtttcgtacaccgcgctgtcgatcaggaacggcatgcggagcgccagcaagtcttcgtaacctttgttctggcgcatttcgatcagctcgcccagcggcagtgtcagctcgacctgccggccctcgcgttccaccaccacgcggcgttcgccttcggtgataatcagcgcattgacgatcttgttcacgttgtccaccgcctcgccgtcgatcgaaacgatcctgtcgccgtcttggaatccgagcttgcggcccgcttcgttgaaggtgtatccccagcgcgcatcttcgttcgagaagtagttgtcaccccacgtgtagcagattccgatgtagatgaagatggccagcagaacgttcatcaccacgccggctatcatcaccagaaaacgctgccatgcgggtttggtgcggaattcgtcgggcttggggggcagtttcatctgctccttgtccatcgactcgtcgatcatgccggcgatcttgcagtatccgcccagtggcagccagcccagcccgtattcggtgtcgccgcgcttgaacttgaagagcgaaaaccacgggtcgaagaagatatagaacttgtcgacgcggattttgaagacccgcgccatgaggaagtgtcccagttcgtgaatgcccaccagaatggtgaagcagaggaaaaattgaatgatcttgatgataatatccatgtccgtgttttggttacaaggctaaaaattccgcggccagccggcgtgcttcgccgtccgccgccgcatagtccgcgagggtgggggccgcagcgaacgatgcgcgattgagcgcatgttcgatggcgcgcacgatgtcgagccatgcgcacctgccgccgaggaacgccgcgacggccacttcgttggcgccgttcatcgtgcaggccgccgtgccgcgccgccgcagacagtcgtaggcgatgtccagcgccgggtatttcacccggtccacctcggcgaatgtcagctgcggatgcttcaggaagtcgaaccgctcgccgggacggttcgcccgtcgggggtacatcagcgcgaggctgatcggcatgcgcatgtcgggcgttccgagctgggccttgatcgccccgtcctcgaattcgaccatcgaatggatgatcgactgcggatgcagcaccaccgagattttctcggccggcgtgccgaacagccagtgggcttcgatcacctcgaaacccttgttgaccagcgtcgaggagtcgatcgtgatcttcgcgcccatctcccactggggatggcgcagcgcctgctcggccgtcactccggccagctcttcgcgcttcaggtcacgcagcgcgccgccgctgcaggtgattatcagccgccgcacgggggactgttcgcccgccagacactggaaaatcgccgagtgctccgagtcgatcggcaggatcggcgcacgcttttcggccgccagccgcatcacgtattcgccgcccacgacgagcgattccttgttcgccagcgcgagtttcttgcccgctccgagcgcggccaccgtgggcgccagccccgcgtagccgaccagcgcattgactgctacgtcggtgtcgccgcccgccgcgacctgcgccacggcctcctctccggcgtaaaccttgacgtcggtgtcctccagcgcgtcgcgcagccgggtgtaatatcgtttgtcggcgatgaccgccgtgtctgcgtcgaattcccgcgcctgcgccgccagccgctgccagttgctgttggccgtcagcacgcgcacttcgaaaaaatcggggttctcgcgtacgatgtcgagcgtctgcacgccgatcgaaccggtcgaacccagtattgccaatcgttgtttcatgcggatctattggaagacgatatatccttcgggatcgacgggcttgccgttgttccagagttcgaattcgaagagtctcacctcgccctgctcggcttcggcgttgtagccgatcagctcgcccgcgcggatggtctgccctttggtcaccagcgactgcgagagtcccttgtagaccgacagcagattcccggcgtgctgcagttcgaccatgtagcccgtttcgggggtccagaggctcagcaccaccgtgccgttgtccacggccgctatgcggtcgctggccgccgccgcaatacgtatgccgaagttgccgttgcggatgtcgaaccggtcggtgatgatgccttcgacgggcgtcgccagctcgatcgcttcacgcaccgagcgccgcgagccgccgctgcggcccgtgacggcgtactcgccgtcgccctccatctgcgccctgagcaccgaatcttcgggcgagggcatcaccagcaccttcgtggcccgcgtgctgtccgaattggcgagcacccgcgccacgggcgtcttgccctccatgatcagggctatgttctggttgtaggtgagcatgtcgttcatcatgcgctccatcgagtccagccggatgatgttctgtaccagactttcgcgcgagcggtcggcttcggtgcggtagcccggcaggaattccagtacggggctgtacgccaccagcgtgaggatgaggataaagagcagcagtgcgaatgaaacgaatgctgcgaagatgctggccggcgagaggtgcatgtgccactcttcgctgttgtccgtagcgttgagcatgttgaagcggcgtttgcggaaaaagctgcgctgccatgcccgtatgttctttaaaaatttcatcaaaccattgcaattatccatgcaaagataaccaatttcatagaaaacctttgcggaacgcggtgaattttttaactttgtaatcgttttgattttaacgccaaaaacagataaaaagtatggtaaaacctacattactggtcctcgccgcaggcatgggttcgcgctacggctcgctcaagcagatggacggggtcggccccaataacgaggccattatcgattattcggtttacgacgcgatccgcgccggtttcggcaaggtcgtattcgtcattcgccactccttcgagaaggagttccgcgaggtcttttcggccgagcgtttcggcggccgcatcgccgtcgagttcgtctttcaggagttggactatctgcccgaaggcgcttcggttcccgaaggccgcgtcaagccgtggggcacgaaccatgccgtgatgatggctgccgacgccgtgcacgagccgttcgccgtcatcaacgccgacgacttctacggcgccgaagcctaccagaccatcggcgactacctttcgcagctcggtgacagcaaaaaccgctactgcatggtcgcttacgatctgaaccggaccctttcggacaacggcaccgtatcgcgcggcgtctgcggcgtggatgccgacggcaacctgacgtcgatggtcgagcgtacgcagatcgagcgcatgcccgacggccgaatcctcttccacgacggcggcgccgacgaagagcttgccgaggatacccccgtttcgatgaacctcttcggcttcacgcccgacttcttcgcctattcgaaggagtatttcaagacgtggctcgccgagaaccgcgagaacctcaaatcggagttctacatcccgacgatggtcaacaaactcatcggcgagggcgcggcgtccctgcgcgtgctccgttcggcggcccagtggcacggcgtcacctacaaggaggacaaacccgcgctgatggcctcgatcgagaagatgatcgccgagggcaaatacccccgcaatctctgggcttagttcccggcgttataataaggggcggcccgaaagccgccccttatcttttgtcccgcattgtcctattgttttccgacgtcttttcggctgcctgtccctgttgtctttgtccgcggttgtcttgccgttttttctgccgctttccgtctgccgcttctcgtctgctgtttctttcgcagctgttatcccgccgccttttccggcgccattccgtccgggcaggaccttccgtacctttcatccgttccgcaaaataaaaaaacaggactccgaaaagtcctgtttttatctttggttaacaactgttgggaacctgttgcgcagccgtcgaacaacctgcggccggccggtcagtccagaaatccctcccgtaccagctgctcccggatcttggtccagtccgccaccggccgtttcacgccgtccacgaaccggatcggacagcccaagttgctgtcgtcgatatagaggtccgcatgaatcttcggcgacgaagtccagcgctgctgcgacgggttttcgttgatggcgtagagcgggatttcccggtccctgaaccacttgactgccttgtcgagcagtgcgcccgaacgcatcgtgtagagtatcagccggcatccgttgtcggtgagttctttgagtacggcaaccgcgcctgcatcgtccccgatttcggggtaggcgtgcgttaccaccgtgccgtcgaaatccacggcgatcaatgcattgtgtatagccatattatttctttactttacgtgcgagtttgctgaagaaaagtttgatccgcttgcggtagcttacctcctgatggtcgtcgccatagccgtatccgtaaccgtatccatacccgtaaccatagccgtatccgtacccgtagccatggcggcgtgtgcgtgtgccgttgagcacgatgcacatgttatggaacttcttctcgcggtagagccgttcgatgtcgggcagctgacggcggtcgagcacgccttcgcgcacgatatagatacagaggtcggccagacggtccgtaatcaccgcatcggctaccgacatggccggtgtgctgtcaatgaatacgaagtcgtaacgctccttcagctgctctaccagcttgtcgagccggttcgagagcagcatctcggtggggttgggcggctgtatgccggcgcagatcacgtcgaggttctcgtggaagcccatgttcgtcaccagctggtcgatgtcggtgatcgttccggccagataaccggacatgccgttcttgctgttgctgcgtcccaagtgcgtcgtgagcgcgtgaaggcgcaggtcgaggtctatcagcacgacccgtttgcccgccatggccagcgtcattgccagattcatcgccacgaacgtcttgcccgcatggggggccgacgaggtgaagagcacgcacttgatctccttgcccgacgagacgttcatgaacgtcatgttcgagcgcaggatgcggaacgcctccgacagcgcgtcgcgtccggtttcccggaccaccacgccgcccttgttgtccccttcgaggaagggtatgtcgccgaggaacggtgcgctgaggttctcctccacgtccttgcggccgcggatggtcgtgtcgagcatgccgatcaggtagagtatgccgaacggaatggccagacctgccagcaggctgatgccgaggatgatcgtcgagcggggcgatacggggcgcgcgcttccgtacgccatgtcgatcgtgcgcgagttgctctcggccacggcgtagttgagctgcgtctcctcctgcttgttgagcaggtagaggaacagctcctccttgattttctgctgacgcatgatgtcgagcatgaccttctcctgcgaaggcatggtcgagatgcggcggttgacctgcgcctcctccttgcgcatggtttcgagctgtatctccagcgtcgaaatgtgcgagttgagcgaggcgatgatcgagcggcgcacggcggccagcccgttgtctaggtcctgaatgaccggactgcgctccgagctgttttccagcagcttctcgcggcgcaggatggcctcgttgtattccgatatctgcgcgacgatgccgttgttggtcatcgaggccaccatcgggatcaggtcgcccgcatgcgacgggtcgttgaggtattcgcggatgaagtcggcgacgcttatctgattctcgatcgtcaggctttcggccttgtagcgcgtgctctcggtgatggtgcgggtcgcctccgaggtgatgtcgatcatcttgttgctcttcttgatgtcctcgatgtcgcggtccacgtctcccagctcgcggccgattacctgcatgcgctccttgatgaagtcggccgtcaccaccgacagctggcgcttgtcggcgatggcgtcttcctcatagacggcgatcagcgtgttgatcacgtcctcggcgcggcgcggcaccgaattgttcatcgagatcgtcacgatcgacgcctgcttgttggccacgtcgctcttcaccgcggcgcggtaggcgttggtcgtcgccgcgagcgaattcttgattacggtgatgggttttttcagataggtcgagtccatgaacagggtcttgtgcacgaccacctgcccgacgggcgtggcgaccgtatcgccgtattcggccagaatgacccgcttggtctcctgccgcgtcacgaacttgtcctcgaagtccgtcagctcgatcttgccgtttctgagcggggtgacctccagcgaaagcttctgcttggagttgtcgttgatgaaatcgacttcgatcggcgaacggccgtacaggtccgccgtgcgcagcccttcccgcaccgagtagttgactgtcaggtggaggcgcttgaccacctccgacatcagccggtgcgactggaggatgtagacctcgttgtctacgttgcggcggttctggaatcccaccagatcgctgaacgcgcccagatccgtgtcgccgcccttgcggctgtccttcacgaggatggtcgccgtccggctgtatattttcggggtgcttgccagatagtaataggccgttcccagacagatgatcgccgagagcgcgaaccagtaccagttggccagaaccatctgaatcaggtcgtggagcgtgatgccgttcgtgttttcggactcttcgttcagcagatgcggattgatgttctgttctgtcatggccggtcttatttggtcagggttatgatgagcgtcgccacggaaatagccgtacccacgagcgaaaggtagaagtttcggttctggctgatttcaccggcctgcgccttgtatttgttgggcttgacgtagatcacgtcgttctgctggatgtagaacgcgggggagttgaacagctccttcgacgtgaggtcgaggtactcgatggtgcgcactccgtccacttcgcgggccacggccacgtcggtgcggataccgtagatcgtcaggtcgccggccatggccagcgcgtcgaagatcgagagtttgtcgcgcgtgacgtcgtagtgtcccggacgtgccacctcgccgattaccgaaatcttcatgtccgcgaactgcacgtttaccgtcgggtcgttgatatacccgccctcgacgatcttgtcggctatggcctgcgccagttcgctccgggttttgcccttgcactcgatctttccgatcacgggcatttcgagctgtccgttttcatccaccgtgcggatttgcagcgactggttggtggcgcttccgtaattggtcgctccggtcagggagctcagcgacgacgacgagttgaacggcacggccagttcggggtccttgctgttgacgacgatcgtcagcctgtcgaggggcttgatgcgtatctggccgttttctgcgatctgttcgggcgtgaacggctgggcatcctgcaggtaccatgcacgcttttgcgaggcgcatgacgtgacgagtagagccgtcagtacgaccggcataaggagacgtaaatgtttcatatttgattaaggcgtttttataatcgtgcgcaaaggtaagaattttccatgaaataaatgcgccctgagtcagctatttccgtcgaattatgcctgtttttgatcggggcggagcgtttgtccggaaaaaaacgtacatttgacaccccgaaaaccgacctttttatttaagctatggaaatgttacatcccgaatggagttatcaggccgtgctctatgaaatgaacgtgcgccagctgacggccgaaggcacgctgcgcgccgcggccgcgaaactgggcttcctgcgcgacatgggcatcgacgccgtgtggctgatgcccgtctatccgatcggcgtcgaggggcgcaaaggctcgctcggctcctattattcggtccgcgactattgtgcggtcgatccctgtctgggcacgatggaggatttcgacgccttcgtcgtcgaagcgcaccggctgggtatgaaggtgctgctggactggatcgccaaccatacggcgcgcgacgcccgctgggtgaccgagaagcccgcttcgtggtacgagcgcgacgcttcgggagcgcccgccgtgccttgggactggaccgatacggccaaactcaactatgccgaacgcgaagtgtggcgcgcgcagggcgacgccatggaattctgggtccgcgaacacggcgtggacggcttccgctgcgacatggcgatgctggttccgatcgaattctggaacgagacggcgcaacgcctgcggcgggtgaagcccgatctgttcatgctggccgaagccgaggagacctaccttttcgacgggggagccttcgacgcctgctatgcgtgggagatgcaccacctgatgaacgacgtggcgcagcaaagggtccgcgtcacgtcgctgcgcgactacatctatgccgaccgccggcgctatccccgttcggccatgcggctggccttcacctccaaccacgacgagaattcgtggaacggctcggagttcgcccgcatgggcgccgcccgcgagatcatggctgtcttcaccttcgtcgtgccgcgcggcctgccgctgatctacaccggtcaggagatcggctacgaccattcgttcgccttcttcgaccgcgacccgcttcccgcctacggctccaatcccttttcggagttctaccgccgtctgacggcgctgcggcacgccaatccggcgctcgcatcgggcgaacggggcggcgagatgatcgagatacgcaacaacgccgaggactgcctgatgattgcggtccgcgaggcggagggcaactgcgtcgtcgcggtcatgaacctctcgccctatgcgatccatgccgattactatacgggcatctacgccggcatgtacaccgacgccatgacgggccgccccggcgaactccgcggccacgtcgaggaggatatggcgccgtggagctaccgcatcctgacccgctgacgcctctgtgccgccgaaaaaagaccgccgcgcgacagggcggccttttttttgcattttgtccggtaacttcctgccggaatccgttccggttccggaatatttgctatttttgccgatgaatatgagacgctttatcattctttgcctgctgctctttgcgagccttgcggcgcaggcccggagctaccgcgccgaggatatccccaatgtccagcgcgccgaccgtacgcgctacgtgtcgaatcccgacggtatcctttcgcccggcgccgtagcgcgtatcgactcggtctgcggggcgctccgcgaccgggcgattgctcaggtggccgtggtggccgtggacgacattgcgggcggcgacgtcttcgatttcgccgtcgatctctttacgcagtggggcgtggggcgcgccgagaacgacaacgggctgggcatcctgctggtcagggaccggcgtgaaatccgcttcgtcacgggcggagggcttgaaggcgtgcttcccgacgccgtctgcaagcggattcagctgaaatacatgctgcccgccttccgcgagggcgactacagccgcggcatggtcgcgggcgtcgaagccgcggcgcagctgctcgaaggcagcgaactggatctgggcggtacggataccgcggacggggagcttccgtcgtgggccgtcttcctgatcgtcgtcggattcgtcgtcctgccgctgggcgtcgtcatgctcggctattatgcccgcaaacgctgcccgaagtgccacaaaccgacgcttcggcagcagtcgaaccgtattttgcaggtgactcccagctaccggctggtcgagtacacctacgtctgctccaactgcggggccgtggtgaagcggcgggccaaaaatctgcgcgacgacaatttcggcggtggcggcgggacgatcatcggcggcttcggcggcttcggcggtttcggcggtttcggcggtttcggcggcggatcgcgcggcggcttcggcggcggtttcggcggcgggtcgttcgggggcggaggcgccggatcgcgctggtaggggcggatgtccgttcgccggtccggagaccgccggttcggccgtccggtcgtccgtcggtccgggaaaccgccggttcgttggttctccggtccggcagctcgcttgctcggttggccgccggttggtttgttctgcagaccggtagttccgccgtccggtagttccgccgtccggtcgtccggctgtccgatagtccgtcggctgtcttcacccgtaattccggccgcgtgcggcgactcttttcgccgggggcttagggaggaccgatttgagattcgtgagtgacgccgaaggcggctgcagcggccgaaggcggaaagatatgactgaaaattgtgtattaaaaataaaaaattgtcgattatgaaaaaatggatttggattggagtcgccgccctcgtggtgatcttcttctatgcaacgtacaacggattcgtcaacaaggaagagggcgttaagaccgcatgggccaacgtcgagacgcagtatcagcgtcgtgccgacctgattcccaatttggtgaatacggtcaagggctatgcggcccacgagacgcagacctttaccgaggtgaccgaagcccgcgccaaagccacctcgatcaacttgtcggccgacgacctgacgcccgaaaagctggccgagttccagcaggcgcaggcgcaggtgcgctcggcgctgggccgcctgattgccgtgtcggagagctatcccgacctgaaggccaatcagaacttcctcgaactgcaggcgcagctcgaaggcaccgaaaaccgtatttcggtggcccgcaagcagttcaacgaagtggcccggacctataacgtctccgtgcgccgcttcccggccaacctcgtcgccaaaatgttcggtttcgagcagaagccctacttcgagtcggccgaaggctccgaagccgcgccgcaggtacagttctaaaggaaatggcgaacgctaagtcgcgcggctgcgtgctgggtgccgtggccgccgccagttacggattgaatccgctcttcacgttgcccctctacgaggcgggcatgggagtggattcggtgcttttctaccgttatctgctggctgcggcgatgctgggcgcgttgatgctcgtccggcggcagtcgttcgccgtgcgccgccgcgaccttgtgccgctggcggtcatgggactgctcttttctttctcgtcgctcttcctgttcgagagctacaaccacatggacgcgggcatcgcttcgaccatcctgttcctctatcccgtgctggtcgcggtcatcatggccgtcggtttccacgagaaagtgagccggatcaccatgctctcgatcctgctggccttcaccggcatcgccatgctctacaaaggcggcggtgagccgctctcctttctcggcgtcgcgctggtttttctctcgtcgctctgctatgcggtctacatcgtgggcgtcaaccgctcgtcgctgcgcggcctgccgaccgagaaactcaccttttacgctctgctgttcggcctgagcgtctatgtcgtgcgcctgcgcttctgcgccgacctgcaggcgatccccacgcccggactctggatcaacgccgtctcgctggcgctctttccgacgatcgtgtcgctggtgacgatggccgccgccatccgcgccatcggctctacgcccacggcgattctcggtgcgctggaaccccttacggccctctttttcggcgtcgtggtcttcggcgaacggctcacgccgcgcatcgtgctgggcgtggtgctgattttggttgccgtgacgctcatcatcgccggtcggtcactgcatattccctttccgcacctgcggttccgccgggcgcggtagggtagtggcggagtatgaaagagaatgcggcattaagccgcattctctttttcctgtccgccatggtcgtcaggggtggttgccgcgcggacgatctacaaccggctcttctcgtcggccgaacccgcctcgacggccctgcgcttgaaggccttgcccgacttgaagttgtagctcagcgaaatgcggaattctcggcagttccattgctgggacacatccaccctgcggacgaatccttcgccgcgtgcgccgacgtgctgcgggcggtcgatcaggttgcgcaccgagcatgcggcggtgaacttgtcgccgaaccgttttttgatccccgcattgaggaagtgcatcggctccacccagcagttgccgaagtccatgcggccctgaaggcggtacgacaggtcgatgtagaacttcgcggggagcgtgaaggtggtcgaagcgttcgcgaaatagaagttgtaatgcgcttcgggcgtatgctggtcgacgcgctggccctgacggatgtaggtggcgttgaggttcatggtccaccatttggcgaactggcacggcgcattggccgagacgtaataactcttcgtcgtgtcgtaattgacccacgctatgcacagccgcttcgggtcgtcggcgtcgggacgcatcgtctgctgtatttcgccggtctggacgacggtgccgcccgtaagcgtgtatttgtgtttcagcaccagcgtcaggctcgcgtcgtgcttgtaggccggatcgagttccggatttcccgtctgataggtgtagtccgaaatctggaaccgctgcgggttgagggtccagaaccgaggccgctcgattgtgcgggcgtactgtgcgatcagcgaataggcgccgtccttggtgagtgcataggagacgttggcgttggggaacagactgaaataattctgcgcgatgccgtgccctttgccttcggtgcgggtgtactcgccgcgcactcccgccaccaagctccagcgtccgagattggccgacgcgatgccgtacgccgcggcgatgttctccgtgtagttgatcgtgaaactctggttgtcgttgcgcgcccatgcgtcgtctttcaggtattcgtacagcgcgtcgttgtgcatgtcgttgtaggtgtacttggcgccggcccgcagcgaccagcggggcgagaatttcttgtcgaaggccagcgtggcggtggtcacgttgtagaccgagaccgaattgtcgcggtaggccgagtctgcggcgggcgcgggggccggagcggttatgcggctgaagttgtcgttctcggcgtccgtggtgcggcggttgtagtcggccagcaccttgagcgtcgaacccagcgagtcgatcttccagatgtagttgaacgtcagcgagtagttgttgcgcgctgtgaaattgtcatagcggctgtcggtgcgggtcaccccctcttcggccgtgaagtccgtgtaggagtcgttgggacctttttcgcggttgcgccagtattcgaactccgcgccgacgctctggcgggaattgatctcgtacaccgaaccgaagctcgcgccgaaattccggtcgcgttcgaatttttcggagtgggcttcgagactgttgctccccgacgtgtagcgggtgttttcgtccgattcgaattcgtcggtttcgaggttgaaccacgccagcccgtagaggtcgagccgtcccgaatggtagttgacgcgcgcacggggattgaccgaccgcacccagcggcccagccgcgaatcgaccgacagcgacccctccatgccgttttcgcggcgtttgcggagcgttatccggatgatgccgcccgacgaatccgcatcgtagtccgcgccggtcgtgggcacgacctcgattttctggatgtcgtcggcgcgcagcgaacgcaggtaggtcagcagctgcgccggttccatgcgcagctcgcggtcgttgacgtacaccttcgaaccgctcttgccgttgatcgagatcttctcgtcgtccacccatacgcccggagcgcgctccagcagttcgatgccatccttgccgatcgccgccggggcgttggccacatcgacgacaaagcggtcggcctcgcggcggatcagctgcgccttgaccaccacgccctcgatctgcgtcgaggagcttttcagcacgatgtcgcccagatcgttgtccgcatcgacgcgcacctgccgcaggacgggatcgaaacccagatactggatcgagagggtgtattcgcccgtcgggaccttcagctcgaaacgtccggcgtcgtcggtcgccatgccggccacctgctcgccgcccctgagcagtaccaccgtcgcatactccacggcctgtccctgcgcgtccacgacgcggcctccggccggatacatgcgggccgctgttgcgttcgccgcagccattgcgagcagcaggataaggaggataagttttttcataatattctgcgtttaattgtaatctgcgtagcattttagttgacgtggcaaagatatgtaaaaatgtttatactttgcaatgcatagtactgtatttttgcagaaaattttgatacatatataaataagacctccgtaccggcagggtacggaggtccgaaagggtaggacggcggggttacctgcctgccggaatctgaatttcggtcagccactcttcctcgctgtccttgttccagatgccgtcgatatagctgaaccgggggcttcccgcgagcttgtatccctctttttcgacgtatgcgtaaagctcggcgaaggtctgcggcagggtgtcgtagtttccgcggtgatacatgcacacggccgtcggcacggcctccagctccttgaattcaatcagctccgactcctctttccgttcggtcaccgcttcgcagtattcgatgtcgatgtcccgttccctgaattcgcaggtgtggtcgatcgtgaagcagtagcccggttcggaacattcgcaacccagccgcgccatctccggtccgatgacattggggcagaggtcgaacagttcgtcgtagcccctgacgacccggcggtggctggcgacgacgaccgccggcagctctttgataaatgctttttccattttcttcggttttgcgagttcttttcccagcctttccagctccgtcatgcgccgctccagccggagcagcgtctcccggcactccgcggttttggccgcgataagctccggcgacgggcgcgtccgcccctcgtcgaacagctctccgatctcttcgagcgtgaatcccagctccttgaggtagcggatagtgttcatccttcccagctggcatacgtcgtaataacggtatccggtccacttgtccacttggctcggtacgagcagtccgatctcttcgtagtgccgcaatgtcttgacggtaacccggttgagcttggaaaattctccgattttgaatttgattttcgttgtcttcataaactctgcgcagtgttcatgcggcaaagatacaccctgaccttggggacgggtcaactgtttcgcattattttttttcggcggcctgcgaaaaaaaaggtccggcccgacggtcatcgtgaatattttgttgaaaaatcgttgctccccgatttaggattcctgcgaataattcctaaatttgcagattgaattattatggctcattgtcccctgacgttattccgaacgctccgctatgccgttttccgcccgatacggcgtccggacgggtgcggcggggtgcggcggccgggccttaaagactgattttatgataagcgcagtttactatatctttctggtcttcctctgcacctttttcatggtgctgtcggccgtcgctctggtcgtgtgctatcctttcgacaagggccgccgcgtggtgcacgaactgtcgcgcattctggtccgcatcttcttcgccgtgcctccccggtggcggcagcgggtgatcggccgggagtacgtggaccggaagaagagttacgtcatcgtgctgaaccacaatacggtgatcgacatcccgacgctttactacattccgctcaatttccgctgggtctccaagcgcgaggtcttcaagacccccttcttcgggcagtacctcgtcctgcacggcgacatctgcatcaaccgcggtcgcgcttccgaagcgctggagcagatggtccgcgacggcaaactatggatttcgcgcggcgcttcggtggccgtattccctgagggtacgcgctccaaggacggcgagattcaccgtttcaaggcgggagccttcacgctggccaaggaggcgggcgtggagattcttcccgtggtgctcgacggtacgaagacgctcatcaaaaagaacgcgctgttcaactggggcaaccggatcacgatccgggtgctgccccccgtctccgccgggcgggtcgccgcggccgagacgcacgaactgatgcaggaggtgcacgacgccatgtgcgcggccctcgccgagatccgaaacaaaaaatagactatggcagatttactcaatacgaatccgaacgacaattacggcgacgacgccatcgtcaccctctcgccgcgggagcacatccgcctgcggcccggtatgtatatcggcaagctgggcgacggcgcgcaggccgacgacggcatttacgtcctcatcaaggaggtcgtggacaactcggtggacgagttcatcatgggcgtcggccgtcagatcgacatttcgatcgccgacaacgtggtttcggtgcgcgactacggccgcggcattcccctcaagtcgctcgcggcggccgtcagcgagatgaacaccggcggcaagtacggcggctcggccttcaagaagaccgtcggcctgaacggcgtcggcgtcaaggccgtcaacatgctttcgagcgaattcacggcccgttcggtccgcgacggcgaagcccgcacggtgaccttcgcgcagggactcgaacagagcgatacgtgggagagcggcgtgagggagaagaacggcactttcatctcgttccgcgttgacgaggaggttttcgggcagtacgcctacaacctcgaatacgtcgagcagatgatccgcaactacacctacctgaatctgggtctgacgttcaatttcaacggcagcagctacgtctcgaaaaacggcctgctggacctgctgaacgaaaacatgaccgaggagccgctctatccgccgatccacctttcgggcgacgacatcgaagtggcgatcgcccacggcacgggttacggcgagagctacttctcgttcgtcaacggccagtacacctcgcagggcggcacgcatcaggcggcgttccgcgaggccatcgccaagaccgtcaaggagttctaccacaaggattacgacccttcggacatccgcacgtcgatcatcgccgccatttcggtcaaggtcaccgacccggtcttcgagtcgcagaccaagatcaagctcggttcgaaggagatcgagccgggcgtgtcgatgcgcaacttcgtcgtggactttctgggcaagcacctcgacgactacctgcacaagcactccgagacggcgcagattctccagaagaagatcgtcgagaacgaaaaggagcgcaaggcgatttcgggcatccagaagaaggcccgcgagacggccaaaaaagtgtcgctcaacaacaagaaactgcgcgactgcaagatacaccgcaccgacaagcatgagctggccgaacagtcgatgatcttcatcaccgagggtaattcggcttcgggttcgatcaccaagagccgcgacgtgcgtacgcaggcggtcttctcgctgcgcggcaagccgctcaactgctacggactcaccaaaaaggtcgtctacgagaacgaggagttcaacctcctgcaggcggcgctcaacatcgaggaggatatggataacctccgctacaacaaggtgatcattgccaccgatgccgatgtcgacggcatgcacatccgcctgctgatgatgaccttcttcctgcagttcttccccgacgtgatccgtcagggccatctgttcgtgctgcaaacgccgcttttccgcgtgcgcaacaagaaggagacgcactactgctattcggaggacgaacgcctgaaggccgtctcccgctgcggcgccaacgccgaaatcacgcgattcaaaggtctgggcgagatttcgcccgacgagttccgcgaattcatcggcgaggggatgcggctggacaaggtccgcatcaccaaggacgacccgatccacgacctgctagagttctacatgggcaagaacacctacgagcggcagggcttcatcatcgacaacctgcgcatcgaggaggatatcgtcgagcaggaccttgcaatcagttaaaggaatatggcagaagaaaaagatatcatcgggcgggaagagccgctcaacgaggacgcatcgaccccggaaacggccgacgaggcagccgacgaaaccccggccgccgggcctcagggcaaggcgggcaagttcgaccggctgacgcaggacgaggggggcgtgcgcaaactgacgggcatgtataagaactggttcttggattacgcttcgtacgtgatcctcgaacgcgccgtgccccatgtcgaagacggtctgaaacccgttcagcggcgcatcctccacgccatgaaggtcgtggacgacggccgctacaacaaggtggccaacatcgtgggccagaccatgcagtaccacccgcacggcgacgcgtcgatcaaggacgcgctggtccagctgggccagaaggacctgctgatcgactgtcagggcaactggggcaacatcctcacgggcgacgaagccgccgcgggccgttatatcgaagcccgcctttcgaaattcgccaacgaagtggtcttcaacaagaagaccaccgagtggatgctcacctacgacggccgcaaggaggagccggtcacgctgccgatcaagttcccgctgctgctggcgcagggctcggacggcatcgccgtaggtctggcgtcgaaaatcctgccccacaacttcgtggagcttatcaacgcctgcatcgcccatcttcagggccgcgaattccagctttaccccgacttcccgacgggcggcatggccgacgtgagccgttacaacgacggtcttcgcggcggtgctgtgaaggtccgcgccaagatttcgaagatcgacaaacgtacgctggccatcaccgaaattccctataccacgaccaccgagtcgatcaaggattcgatcatcaaggccaacgacaagggcaagatcaagatcaagaaggtcgatgacaatacggccgaccgggtcgagatcgtcattcaggtctcgcccgacgagtcgagcgacaagaccatcgacgcgctttacgccttcacggactgcgaagtctcgatcgccccgaacgcctgcctgatctgggaggacaagccccattttctgggcgtgagcgaaatcctgcgccgctcggccgagcataccaaatggctgctgggccgcgagctggagatccggctcggcgagctgaacgaagcgtggcacgccgcgtcgctcgaacgcatcttcatcgagaacaagctctaccagctcatcgagggcagcaagagccgcgaggaggcctacgccgccgtggacaaggggctggagccgttcaagaaactgctccgccgcgaggtgacgctctccgacgtgcagcggcttacggagctgaagttcatccgtatttcgcgttacgacagcgacaaggccgacaatgaaatccgtcagatcgaggaggacatcaagtccacgcagtacgatctgaaccatcttaccgaatatgccgtggcctattacgagcgtatccgcgacaagtacggcaagggccgggagcgcaggaccgaactgcgcgaattcgacaatatcgaagccacgaaggtcgccgtgaccaacgccaagctctacgtggaccgcgccgaaggcttcttcggcatcggcaagtcgatgaaggacgccgagctggtctgcgactgctcggacatcgacgacgtgatcgtcttcaccaaggacggccgctacgtcatcaccaaggtcagcgacaaggccttcttcgagaagggcatctattatatcggcgtcttcaagcgcaacgacgagcgcacgatctacaacgtgctgtaccgcgacggcaagaacggtccgatcatgatgaagcgctgcgccatcaaggccatcacgcgcgacaaggagtacgacatcaccaagggcacgcccaagagcgagatcctctatatgtctgtcaatccgaacggtgaggccgaggtgctcaagatttacttcaagccccgtccgcgtctcaagaaggtgatcgtggacctcgacttctcgaccctcgccatcaagggccgccagagtcagggcaatctcttctcgcgctacggcatccacaagatcgtcctcaaggagcgcggcacttcgacgctcggcggccagaacgtctggttcgacgaggatgtccgccgcctgaacgccgacggccgcggcacgctgctgggcgagttcaagggcgacgacaagatcatcgtctggacctccaagaaccagtactacatcacgggttacgacctcggccagcatttccccgacgagaccgtgcgcgtgagccgttacgaagccgaccgcatctacagcgtctgctattacgaccgctcgcagcagtactactatatgaagcgtttcacggccgagatgagcgacaagatgcagttcttcctcgacgaggagggacaggccgatctggtcgccgtgacggaacgtacgggcgccaagctcgaaatcacctacaagggcgcgcatgcgtcgcgccctgcggacgagatcgacgtggacgaattcgtgggcgtcaagagccaccgcgccaagggcaagcgcctgacgacctacgacgtcgtcgcgctgcgcttcatcgaacccgaactgccgcccgaacccgaaccttcggacgacgacgctcccgacgatacgccctccggcggcggtgcttcggccggagcgcaaggcggttccggcaacggtgcggccgacggtgcggacaaccgtgcggtgggcggttcgaacggtgatgcggctgatcgcggcgcagctctttccggtggagttggttctgccgtctcttccggtgcgaattccgccacggaaggcccggactttgcgccggcctcttccgccgcggacaaccccggtgcgccgggcagaccgggcggcgatacggccgcgcccgcgcatgaaaaacctgcggccgccgacaaaccggctgcgaaagacaaacctgcggcaaagacctctgatccgaagaaaacgcccgcgtcgtccgccggcctgccccgtacgggcacgacttcgggcggcgtggagttcgaaatcgaacgcgccaaaggcgatgccgacgaggtgatcgaccccgaacagctgaatctgttttaacctccggcgatgaaacctctttttctgatcggttacatggggtgcggcaagagcaccctcggacgcaggctcgcacgccgtctgggtgcggagttcgccgacaccgacgcgctgatcgaacggcgcgagggggcttcagtggccgatgttttccgttacgaaggggaggagcgtttccgcgaggtggagcgcgaagtgctggaacagacgctcgccggaaccgccgccgtggtctccacgggcggaggacttcccgtctggcgcgacaacatggcccgcatgaacgctgcgggatttacggtctacctgcgccgcgaggcggagcagattgcccggcggctgagcccttacggacggcagaagcgtccccgcctgcgagggctggacgacgccgaactggtcgagttcatgagccgtgacatggctgtgcgcgaaccgttttacgcgcaggcgcagctgatcgtcgattgcggcgagctgtccgacgacgaggtggtcgaaacgatccttcgacacacgatgcagaacgaataaccttcctccgcggcggttgctttccccgaagcggacggagtgacaaatacacagaaacgaatgaacgatgctcccataggtgtttacgattcggggctgggcggactgaccgtctggcgcgaggtgcggcgcatgctgccctccgaatcgctcgtctatctgggcgacggcaaaaactgcccctacggatcgcgcccccgcgaagaggtgcggcggctcgccgacgaagccgttgccagcctcgtcgcgcaggggtgcaagatggtcgtcgtggcctgcaataccgccacggccgccgcaatcgacttcctgcgggagaaatacgccccgatgccgatcgtgggcatggagccggccgtgaaacccgcctgcctgaatacccgcagcggggtggtcggggtgctggccaccgagcggagtctcgacggcgaacttttccgccgcacggcggccaaatacggcagcggcgtcgaactcatcaccgcccccggccgcggtttcgtcgaactggtcgagagcgaccgcgaatcgacgcccgaagccgagcaggccgtccgcgacgccgtcgcggtgatgctggaacacggcgccgaccagatcgtgctgggatgcacgcactatcccttcctgcttcccgtgctggaacgcgtcgtcgcgggccgcggcgtcgaaatcgtcgatccgtcgcccgccgtcgcccgccgcgtcgtccagctgctcgaccagtacggcctgcacgccgccccggaccatgtcccgtcctatacgttccgcaccttcgccggcgaaagctaccgcctgcgtctggaacataaggccgcagagtcgctctgagcgggcgcgggattcaataaaattccccctgataccccgaatgtcgaaaaaaatgcgtaacttcgcttgataaaatcaagcgtaacacgaaatggcatctaaaaatacgacaaatacaactgcttctaaaaacggacgtcagcgcatcgaacgctccaacagcgacagcgcccgctggatcgcgggccttttgctgctgttcgtcggcgtgttcgccgcgtcgtccgtgctgttttcgttcttcagctgggccgccgaccagagcggcctgcaactctcgcctgaggagcggctgacgctgggcgtcgagccggagaacctctgcggctgggcgggcgcgaagctgggacgcctgctggtcgataattcgttcggcgtcttcggcatcctgattccgacgatgatcattctcgtcggcgtgcggatcatccgccagcgtccgctgctgttcaaccattcgattctctcgctcttcctgatcatgatcctcggttcgctgacgctgggcttcgccttcggcgacaagtggagcctttgcagctcgacggggtggggcggcgctttcggcatcgagaccggcgccctgctgcacacgcatatcggcgtcttcggcacgcttatcctgctcgtgggttgctggatactgacgggcgtcttcatcaaccgcaatttcatcaacaaggtcaatcgcgcgggcaacgtcatggtggacaagagcggccggatcgtcgagatcgtcaagcataaggtcgttccgggacacctccacgccgaggaggccgacggggccgtttctgctgccgcaacgccggccgcgccggatgccgccggggcagccggaacggagcgtgccgccgaacccgaaatgccgcgcgccgtgcgcgtgccggagcctgaaacgccgcgcgccgcacgtacgccggaccccgaaatcgtacgtcccgcccgtgaaccggaagcagccgcgacgcagatcgttcgcggcgaagaggacgatcccttcgtcgaaatctcgtccgacggcactcccgtcggctcggaacccgcccgcgaagcggaatccgcggtaaggaccgacgaggacggcgaatttatcgaagtggacctctcgcgtcccgaagggcggctggtgctcggccccggcggactcgtcgagctggagcgtccctcgacaccctcggccgcaccttccgccggaactccggtccgcaatatgcccgtttccgacggtccgttcaccgaacttaccgtaggcggagatgccggcgcatcttctccggctgccctcgccggagccgctcccgaatccctttccggcaccgcatctctcgccggcaccgcatctctcgccggcaccgcatctctcgccgcggctgtttccgcatccggagatgcgcctgcgcatggagccggctccgcgcccgaatatgaatccgcacccgccgacgcatctgtttccgcgggttcggccggtgccgaaggcgtcgtcgttacggtcgaagccaacgaggcccgcatggtcgacgagcgggcgatcacgaccgagagctacgatccgctgaaggacctcgtgaactacagcaagccgcccgtgacgcttctggaggactaccagtccgattcggaggttagcgacgaggagattttcgacaacaagacccgcatcgaggagacgctcaagaatttcggcattccgatccagcgcatcaaggccaccgtcggtcccacggtcacgctctatgagatcgtgcaggcgcagggcgtcaagatttcgaagatccagagtctcgaaaacgacatagcccagagccttaaggcgctgggtatccgcatcatcgcgcccattcccggcaagggcaccatcggcatcgaggtccccaaccgcgacaagcaggtggtgtcgatgtactccgccgtgcgttcgctgcgttttcaggagtcgaaggccgagcttccggtggtgatcggccgcacgatccagaacgaaaactacgtcttcgatctggccaagatgccgcacctgctggtcgcgggtgccacgggtcagggtaagtcggtgggactcaatgcgatcatcacctcgctgctctaccgcaaacaccccgcgcagctgaagttcgtgatgatcgaccccaaaatggtcgaattctcgctctacgccaagatcgaacggcatttcctcgccaagatggaatcggaggacgatgcgatcatcaccgatccccgcaaggcggtctatgcgctcaactcgctctgtacggagatggacaaccgtctggaactctgtaagaaggccggggcgcgcaatatcgccgaatacaacgagaagttcacctcccggcggctcaatccgcataacggccaccgctacctgccttatatcgtcgtcgtcgtcgatgagttcgccgacctgatcatgaccgcccgcgaggtcgagggacccgtgatgcgtctggcgcagaaggcccgcgccatcggcatccacctgatcatcgccacgcagcgtcccgacgtgaaggtcatcacgggcggtatcaaggccaacttcccggcccgtatcgccttccgcgtgatgcagatgatcgactcgcgcacgatcatcgaccagccgggcgccaaccagctgatcggccgcggtgacatgctcttctcgaaggacggcgagctgacccgtatccagtgtgcgctggtcgagaccaaggaggtggagcgcgtcgtcgattacatctcccgccagcagggctataccgaagcctacccgctgcccgactatacgcccgatgcggacggcggcggcagcagtctgggcagcgaggagtccgctccggtgaaatacgactcgctcttcgccgagatcgcccgcgacgcagtttcgggcggcaatatttcgacctcgatgatccagcgcaactacgaagtcggcttcaaccgcgccggtcgcatcatgacgcagctcgaacgtgccggcatcgtcggccgccagcagggggccaagccgcgcgacattctgttccacgacctgccgtcgctcgaagccaaactgcaggacctcggtttattctgatgcttacgcccatgaaacgacttttgttcgcaatagtgctgctgtcagcggcccggacggccgccgcccgcgggatgctttccgaaaccgccgccgtaaccgaaaccgccgccgcgtccgctgtttcctcagcgtcagccgaaaccattgcatctgctgttgtctcgtcgtctgccgaaaccattgcatctgctgttgtctcgtcgtctgccgaagctgttgcgtctgctgtttccacagcgtcagccgaaaccgccgcatccgctgttttctcagtgtctgccgaaactgccgtgtcgggtcttcgtgcggttttcccggaaaccaccgtatccgctgttcctgtggccgcaggtgatttcttccgttccggcgttccggctgctgctgcatctcccgcagcctccgcggcggttgccgcccttgcgccttctgccgacggacgggccgctgagattctcgaaaaactggctgcgggattccgtgcgctgggcgcttacggagtggcgttcgaggtcagctcggacgaatacaccacccgcggccgttatgccgtcgagggtgaaaactactatatcgcggtgggggaggcggaggtctactgcgacggcaaaatccgctacgagatcgacaaccgccgccgcgaagtgaccatcgacgacgtggatacttcaagccgtaatctgctcagcaacccggcccatgccttcgacttcatcggtacccagtatgccccctcgctggtgagcgacgcggagggccgggccgtcgtgcggctgaccccgacttcggcggacgcctcgcccgccggggagattctcgttacggtcgataccgccgcgatgcgccccgaatcgctccgctacgattacgacggcgagcaggtcggcatcgccgttctcggcgttgccccgctcgacacgccgctcaaagccttctccaaaggggactacaaaggttacgaatttatcgacttccgctgatacgcctgcgcggatatactccggcggatactttccgtggatacacttagtggatacgaacggcgtgcgtatgtgacggctcatgccccggattgcgcgccggactgccgcgtccctgctgccgcaggaatttcctgccgcttatttccggttgagataccagtacagcccgcccacgaagagcccgccgcccacgatgttgccgagcgtggccggaaccagattgccggcgaacagctccgccgccgataccggtgcgccgagcagcatgcccagcgggatgaagaacatgttggcgatgcagtgttcgtagccgatcaccacgaagcacatgatcgggaaaaacagccccggcatacgtcccggcacgtcgttggcgctcattccgagccatacggccagacataccagccaattggcgcccacgccgcgcaggaaaaccgtgctccacggcagcgataccttcgcctgcgcaatattgcaggccgcttcccgccacatttccgacgacagcacgccgggcagaaccaccagaaaataggtgaagaagagcgcccctgctaaattccccatccacacgagcgtccagttgcgcgctactttgccccagccgtaccggcgggcgagcgcccccggcatcagtacggcgttgttgcccgtgaacagctcggctccggtgaataccaccagtataagtcccagcgggaataccgcgcccgacagcaggcgctggaatccgggcgcttcggccgctccggggaacccgaatcccgccatcagcgagaacaggccgcctatggcgatgtatgcgccggccagaaatgcgagtatgagggtcttgccggccgtattttgcagtttgtccgccgcggagcttccggccagcgcgaggacctctttgggggtattgattcgggtcataaaattcgggtcgaagccgcaaaggtaaaaaaatcctcccgaaacggcaaaaaagcggagcgtgcttcccggaaatcgttttttccgacttttcccctgcgtctgaaaacgcatgcgcccccacccggccgcggccgccggctctcgcccggctgcaaacaggctcgttttctcccgacacctcgtcgggagatttttttcaggccgtcagatcggcggaaaaggggcaaaaacggggtgccggtccggaaatcttgtgcgccggcgtcagatttatcgccctaaagttgctcagatcggaaataaatcgtatttttgttcgttaaaagaccgtaatttcaagagacaagatgctaactgaagaagaaaagaatgccggtttggtaggacgtatcattcctatcaatatcgaagagcagatgaagtcggcgtacatcgactattcgatgtcggtcatcgtgtcgcgcgcgcttcccgatgtgcgcgacggcatgaagcccgtacaccgccgcatcctctacgatatgagtgcggagctcaacctctactccgataagcccacccgtaagtcggcccgtatcgtcggcgacgtgctcggtaagttccacccccacggcgatacgtcggtctacgacgccatggtgcgtctggctcaggactggtcgatgcgttatccgctggtcgacggtcagggtaacttcggttctatggacggcgactcgcctgcggccatgcgttacaccgaggcccgcatgaagaagatcaccgacgaggtgatggccgacatcgacaaggagaccgtggactggacgctcaacttcgacgatacgattcccgaacccacggtgcttcccaccaagattccgctgctgatcgtcaacggcgcgagcggtatcgccgtcggcatggccaccaacatggccccgcacaacctgagcgaggtcgtagacgcctgttgcgcctatatcgacaatcccgaaatcacgggcgaggagatgctgcagtatatcaagggccccgacttcccgacgggaggtatcatctacggctacgagggtgtccgcgaggcgatgcttacgggccgcggccgcgttatgatgcgcgccaagaccgatatcgaacatacccccagcggccgcgagtgcatcgtcatcaccgagattccctacatgatcaacaaggccgagatgatcaagaagatcgccgacatgatcaacgagaagaagatcgagggcatctcctacatcaacgacgaatcggaccgcaacggccttcgcatcatcatcattctcaaacacgacgccgtcgccagcgtcgtgctgaacacgctcttcaagaatacgccgctgcagacttcgtttgcagtgaacaatatcgcgctggtgaacggccgtccccagatgctgccgatgcgcgatctggtcaagcatttcgtcgatcaccgccacgacgtggtggtgcgccgtgcgcgcttcgacctgaagaaggccgaggaacgcctgcatatcgtgcagggtctgctgatcgcgcaggacaacatcgacgagatcgtgcacatcatccgttcgtcgcagacgcccgacgccgccaagcagacgatgatcgagcgcttcaacctgagcgacattcaggcttccgccattatcgagatgcgcctgcgcgccctgaccggactcgaatacggcaagctgatcgccgagcgcgacgaacttaccaagcagatcgcctacctcaaggaggtgctcgaaaacgtcggcatgcagatgcagatcatcaaggacgagctgctcgaaatcaaggagaaatacggcgacgaacgccgctcggagatcgtttactcttccgaggagttcaaccccgaagatttttacgccgacgacgacatggtcatcaccatttcgcacatgggctatatcaagcgtacgccgcttgccgagtaccgcacgcagaaccgcggcggcgtcggcgccaagggcagcgccacgcgcgacgaagacttcatcgaacatatctacgtggcctcgatgcacaatacgatgctcttcttcacggagaagggccgctgcttctggctcaaggtgtacgagattccggaaggcgcccgctcttcgaagggccgtgccatccagaacgtcatccagatcgaacccgacgacaaggtccgcgcctacatcaacgtcaagcgtctgaacgacgaggagtacgtcaacaacaacttcatcatcatgtgtaccaaggacggtacgatcaagaagaccaagctcgaagcctactcgcgtccgcgtcagaacggcgtgaacgccatcgtcatccgcgagggcgaccagctgatcgaagccaagctcaccagcggtcaggccgaggtgatgatcgcggcccgcgacggcaaggccatccgcttcaacgagagcacggtgcgtcctatcggacgtgtcggtgcgggtgtccgcggcatctcgatcgaggagagcgacgaagtggtcggcatgatatgtgtcgaacccgattcgaagcaggacgtactggtgctgagtgagaacggttacggcaaacgtaccgatctggacgaataccgcatcaccaaccgcggcggcaagggtgtgaagacgatcaatgtaacggagaaaaccggcaaacttatctccattcaggccgttacggacgacaacgacctgatgattatcaaccgttcgggacttaccatacgtacggcagtgtcgcagatccgccttgcgggccgcgcgacgcagggcgtgcgtatcatcaacctgcgcgagggcgacgccattgcttcggtgatggccgtaccggcagcgggcgatgaagacgaagaagtacaatccgcagaggtcgctgcaaccgggaatgacgccactcccgaagcggaccgtccggcggaggagtaatgaagaaatgactttaaaacattaaaattcaatctgttatgaaaaaagtatttttgacggtccttgcggtggctctcgtagcagttactgccgttcaggcccagaaagtaaacaagtcggcgcttgtatccaagatcgagaagagcgacgccgacatcgccgatgcgaagaagggcgccaaggctgcgacgtggatcaaccgcggcaaagccttctacgaagcggctatcgaaccgacgaagagccttttcgtcaatatggacgccgcgatgctcaagctggccgtgggcgaacccgcctcgaccgaatcggtgacgctcgtcaatgttccctacgaggcttgggtctatccttggttcacggcatatatcaaggacggcaagatcgcgacttggagccagacgcagtgggtgattgaagacgctcccgccaaggctatagaagcctacaacaaggcttatgaaatggcccccaagacggccgataaggtcaaggaggggctcaagcagatcagcgacttctgctcgcaagtgggcaatacgggcatcgacaccggcaattatgccgatgccgccgacgcctatgcactggctttcgaagcccagtccagccccgctcacggcaatcccgaacccgcgctgctctactatgcgggttatctgcgcacggtggacggcgctgcgaaccctgcatcgtacgtcatcggtgccgattacctgaacaaggcgctcgatctgggctataacgacgaggaaggcaatatctactactaccttttccactgctactacggccagaaggacgccgacaaggccaatgtcctgaaagccaaggatgcgctggtcgccggtatcaagaagttcccgaagaacgagcgtattctcgacggtctggtgcagctctataccaatcctgaggattcggtgggcgaccccgccgacttggtggcgctgatcgacgcggctatcgagagcaatccggagaatgtggatctttggttcggccgcggccgtatcttcttcgcgctgaagcagtacgacgaaagcatcgcatcgttccaaaaggtcgtcgaactgaaacccgaactcttcgaaggcaactactatctgggcgtgttctacacgatcaaggccgacgagatgaacaaggtgatgaacgagaagcagtacagcagtcaggccgcttacgatgccgacctgaaagccgccaatgcggtctatatggaggctattccgtggttcgagaaggcccacgagctgaaagccgacgacttcaatacgctcgacatgctcaaacagctctgcttccgtctgcgcgacgaacccggcattcaggagaagtatgacaaatacttcccgctctggaaagccgccaagggcgaataaccgccgcataacgggcgggacagccctccggcaatatagaaccacccgactcgcaggagccgggtggtttttgtttgcgctcttttgtccggcgctttatccgatgctatgtccggtgcgcactccgaataaggaatagcccccgaacttaattcgggggctattccttctccagctccatctgtcgcagtattccccggcggtcgaggataaaacgcttcatcagccggaagtgggaggtctcctccagctcggtcggttccagcccgcggtccgtgatttcgtatatctcggcgtcggggtaggacatgacgatcggcgagtgggtgctgatgatgaactgcgatccctgctcggccagctgcttcatccggcacagcatgtacatctggcgcgagggtgacagtgcggcttccggctcgtcgaaaatataaagtccgtgtccgaagagccggtgtccgagcagcgccagaaaactttcgccgtgcgactgctggtgcagcgacttgtcgccgtaatatttcagtacgccgtcggcgacgttttcgatttccgtcgccacgttgtagaaactctccgcccgcaggaaatagccgtcgcgcggctggagtccgcgtcccagaacgacatgttcgtaaaggtccgaatggctggcgcgcgttgcgaaccggaagttcttggaccctccttcgggattgaatcccgccttgacggctatggcttcgagcagcgtcgattttcccatgccgttctcgcccatgatgaaggtcacgggcctgcggaattccagccgccggaagttggccagcgccggaacggtgtacggataggtctgcggcgtttcgtcctcctctttcaggcggacgtatttgatgtagagcgaatcaggggtcagttccatggcggtcagactgtcgctttcacatagatcgaccgcaggcggtgcgtcatgaagtattggagcaccccgcgcaggaacatgtagagcgtgaacgccagccagagcgcgttgttgccgattatcgcgtagccgacgtagaagatgccgaagtaggccgccgtggcccagaacatcgagttgcgcatgacgcgcgtctcggtcgctccgaccatgatgccgtccatgatgaagggcatggcgctggcgaccggaatcaggatgatccatacgatatactctcccgccagctccacgatcgtcgcggcattgggcgccgtgctgtccacgaacagccccaccagttcgcgccaccagccgatatagatgcctacgaacagcaccgacacgaccgtgccccacgcgatgcagcggcgcaggcagtcgcgcagcgccccttcgtcgcgtgcgccgatgaatcggcccgtcagggcttcggcggcgtatgcgaatccgtcgttcatgtacgagaagagcgtaaacaactgcagcagcagcgtgttgacggccagcagcgccggttcgtccatgcgggccgacgcccctgtgaagaaggtgtagacggccacgatgcagaacgtgcgcagcatgatgtcgcggtttacgatgaagaaggtcctgagcggtttcaggttcaccacctccgcccagtcgattccggtcagtatcctgcggtagcatgcgaagagcagcagggcggagagggccacgcccgtccactgcgcgattaccgaggcgtaggcgatgccgacgatccccatgtccagtccgaatgcgaaccagaggctgcacagcacatggaccacgttgaccgtgatggccgtgaacatcggtatcagcgcgttctgcattcccgtaaaccagccgttgaagccgaacagcagaatccccgccggcacggcccagatgcgggcgtagaagtactcgcgcgtcatgtcgttgccgttgagtccccacagggccagctcgcccagcgggtattgcagcagcaacatcagcaggcccattcctccggccacgagcagcgcccggaccagcatgttggtgcattcgcggaagttgcccgcgccgaatgcctgcgccgtcagtccgctggtccccatgcgcacgaacgagcagttccagtagatgaagttgaagatcgacacgccgatggccagcgcgccgatcgttgcggccgtatccgaaccccagtgcccggcgatcgccgtcgagacgatgcccatgagcggcacggtgatgttcgagacgatattggggagcgcaatgcgcagtatttcacggttcatgttcatggaaagcgacgggggaaatacccggcaaacgacgccgggcattgtttatggacgcaaagataacgcaaaagcggcgaatttgtaacggcctgcggcttttatctccgaatcgggcacgcaatatgcttttatccggaaaattcgattaactttgccgcgtaaacattcaaactgattatgaaagactttaaaaacgactcgacctcggtgcttacgcgtttcggacgcgacaagcgtcagcgtaccgtgaccgctacggcggagcgtgtcgagcgtcgcccgcgtttgcagcgtgatgctgccgattcggagcagccgtccgatgaccgcaagcccgtcaagcgggcgtcgtacaatccccactttacggaggacaaccgtcctgcattcgacaaaccgcgccgcagtttcggcgacgaacggcagggcgaccgcgcccgttcggacgaacgttaccgcgacggcgacaaaccgcgccgctcgttcggcgataagccccgcggcgaaaaacccgcctacggcgacaaccggggacccaagaaattcggcgaccgcaagttcggcgacaaaccctacggcgaacgtaaatccggcgacaagcccgccggcgaccgtcggttcgcagacaaaaagtccggcgatcgcaagttcggcgacaaaccctacggcgaacgtaaattcggcgacaagcccgccggcgaccgtcggttcgcggacaaaaagtccggcgaccgcaggttcggcgacaaaccctataagcccggattccggaagcacgacgacaagccggcttcctatccgaaattcacgcccgaaaagcagatcggcgaaatgcgcctgaaccgctttctggcccagtcgggactctgctcgcgccgcgaggccgacgatttcatcacggcgggtctggtgaccgtcaacggtcagatcgtcacccagctgggcaccaaggtgctgcccaccgacgaggtgaaattcaacgacagccgcgtgcagggcgaaaagaaggtctatcttgtgctcaacaagcccaagggctatgtgacttcgctcgacgatccgcatgcgggcaaaaccgtcatggagctggtgcagggcgcctgcacggaacgcatctacccggtggggcgtctcgacaagaacagtctcggactgctgctgttcaccaacgacggcgatttgaccaagcagctcacccatccggccttccggaagaagaaaatctatcaggtgtcgctcgacaaacccctgacgcgcgccgacatggaccgcatcgccgagggcattacgctcgaagacggcgagattttcgccgatgagatttcctatgtcaaggacaacaagcaggaggtcggcatcgagatccattcgggccgcaaccgcatcgtgcgccgtattttcgagttcctcggctataccgtcaccaagctcgaccgcgtctactatgcgggtctgacgaaaaagaacctcaagcgcggtgcatggcgtttcctctcccgcgaggaggtcgaacggctcaagtccggccagtacgaataacgaaaaagggtgattcgcaagaatcaccctttttcattcaatgcgtgtcccggtaccagctcgtctgcttgttctcctcgacgtatttgtccgacggttcgctgaacgacactcccgaatagtaggcgacggggttcatccggccgttgtacgccgagtagaatcccggtgtgctgagccgtgcggctttgggaaacgccttgtccagctgcgctttgaaatcctctttcagcttcgcgtcgccgcaggccagttcgacccagtggcccagatcgtagaatatgtgcgaagacattccctcgtagctttgcagctcttcggcataagactttttcggcgcggcgttgatgcgccgcatgacctccttcatgccctccatttccgacatcacggccagcgaaatgcagcccgattgggtcgtcgcgtcgttcatgtagaagttccagaatgcttcgcatacctttgtcagatcgcgtcctttgccgccgtcggtgaagaaccacggcatcgcccggtcgtaggggaatccctgtcccatgatttcgcagggcgcggcaatcacgtagtccgtgcattcgcgcaggtcgtaaagcgtctcgatattggccatgaagcaggcgtcgaaaagcaggtagtcggtcctgtaattctgggccttgaccgccgctgcgaagtccgtaatgtcgatcgaccgtcccgtgtcgccgaacgaacgggtcgtcagcgctcccggcgccggggtccataaatcctccagctccttcgacatccgggccgagtagctgagcgctccctgattcgcgggcacccacgccttgccgtgacagccgacgatgatcccgtaatgctgcgccggggcgagcgcctccacgtcggccagcatgcgctgtacgcatgcgggatcggccgccgcgaaatcgtcgtagcttttcagcagcgcgaatgcggccgcctgcttttcggcgttgaaatacgcctcgtacatttcggcctgcgagtgcgcgttgggctgatagcagaccaatacgcggccgtcgcccggaacgttcgcatcgacggctttcaggacgccgtcgatattctgcttgtagaatttcagcagatcccgtcccggcatgtagagcagcatggtctgcgtcgccgtcgccggactctgcgacacggtgacgctgcactgcgcgcctcctgcgttcagagtcagtgcgaccgtccccagcttgacgcggctgcggcccggattcccgtccgacgccgtcaccgttaccgtcgtctcgccccggccccctgcggtgggggagatgccgaatccgctgcccgtggtggtcagcgtccacggtccggtcgccgtcacggtgaacgccgctgccgatccggccgtgctgcgcagcaccgcttcttcctgcgaactcgctatttccgccggctcccgttccttttcgcagccggcgaaaaccgccagcgccagcagcagggcgaacgtgcgccggattatttgtacgtacggggtttgaggttgttgaactgccatgtgcggtcgcgtttataggtataaccttcgggtttgttccagtatatgcgtccgaagtcgtagtagagtcccttgcgcttcttgccctccaccgtgtagggtacggtcagcgggatgaactccaccgttcggctgatgatgcggctcttgtcgtacgaaagcccttcggtggccatcacgtcgagcgcgtggtcgaacatcaggatatggcgcggcgttttctgcgtcagcgcgtctcccgactcccggatcgcccggatgacgccctgcatccggttgtagtacatcttttcctgcagtttgttgcccagcgcgccgtgggcgtaggccatcaggttgaggatcttggggctgaacggatcgcgggccagtgcatcctcgcccgtgtagagcatcgcttcgagcgtctcgacggccggtttgtcgggatcgagtcccgaagccatcaacagcagcttgtccagatcgggattcgagtccagcggtttgtagctctcctgataggcgtagccgtaatagaggtagtggtaatcctcgtcggtcagcgtttcgtcgccggcgttgtagcgcatcatcagcgacggatagtagaacggcgactcggcgtccatcgtcttgttctgaatatcctcctcgtcgggaactttcgccgcggccagcgccggaagcagaagcagtaacagcagtaagtttttcatatccgtgttttagtccgtattttagacactaacgcggaatcagcgcaaatcgtattccgcaatcagccggctgaacttttcgcgcagcgcctgcgaaccctcgaccagcggcagccgcatcgtggggccgattttgcccatcaccgagagcgcgcatttcgcacccacgggattcccctcctcgaagagcgcgtgcaccgcttcgtcgagcgccctgtactcctcttcggcgcggtcgaaatcgccctgcttggcatgaccgacgcactgcatgaaacgtttgggaaatacgttcgccgccaccgaaatcacgccttcgccgccgcggcgcatcaggtcgagcgtcatgccgtcgtcgcccgacagcaccagaaacccttcggggcggttgtcgaggatgcgctgcatctgctcgatgtcgcccgacgcctccttgatgccgatgacgttcttcatgtcgcgcgccagccgcagcgtggtctcggcggtcatgttcacgcccgaccgacccggtatgttgtagagtatcacgggcaggggcgaatgctccgatacggtgcggaaatgctggtaaagtccctcctgcgagggtttgttgtaatagggcgtcacgctcagaatggcgtccgcgccccgcaggtcgaattcgcggagctggtccagcacctccgacgtcgagtttccgccgcagcccatcaccagcggcacgcggcctgcgatatggttggtgatgaacatggcgatcaccgcgcgttcgggcatgtagagcgtcggggtttcggccgtggtgccgagcgccacgatgtaatccacgccgccctctattacgtagtctatcatgcgcgccaatgcctgataatcgacgcgtccgtccgatgtgaagggggttatcatcgcgacccccacgcctgtcagtttctctcttatcatcgtattccggttttgttcgtagtttcttttcctgcggccgtcttccgcggtccggcgcttacgccgttcccgccgccgcgtttcctgcttccgctgttgtatttcctgcttctaccgccgcatctttgtttgccgccctgcgttttagccttctttctgcattgcgtcttctgccttcactgctgtgttttcaacttccgccgccgcgtttcctgcttccgctgttgtatttcctgcttctgccgccgcgtcttcgtttgccgccctgcgttttagccttctttcggcattacgtcttctgccttcactgccgtgttttcaacttccgccgccgcagcatcttctgttcccgccgttgtcgtctcttccgttcccgcctccgtttcttcgtaccggcggggacggcctatccggttgcgtctgccggctaaaacagcttcggctcggccacatccttgtgcgccgcgctcccttccgcgcccccttccgtccgcttttccgccgcatttgcggcgggtatttcgtcgctgccgatcatggcgataaaatcctcttcggagatgatcttcacgcccagcttctcggctttcttgagcttcgccggccccatattctcgcccgccacgatgtaatcgacgttcgccgatacggccgcgaggttcctgccgccgtgtatttcgatcagctctttcagctcgtcgcggctgtggttcgagaatttgcccgatatcacgaaactctttcccgcgagcgactccgacgccagctcgcgcgcttcggcttcgaacttcacgcccgcgtcgcgcaggcggcggatgatggcgaggttcttctcgtcggcgaagtattcgatgatcgcgtcggcgatgcgtccgcccacttcgtcggcttcggtcagctcctcgcgcgtggctttcatcaccgcgtcgagcgaccggaagtgttccgcgaggtatttggccgtggtttcgcccacgaagcggattcccagcccgaacagcacgcgcctgaaaggcacttcgaccgatccccggatactccggatgatgttgtcggccgacttctcgcccagccgcggcaggcacgccagctgcggagcctgcaggtcgtacaggtcggccacgtcgcgcaccagcccgttttcgtaaagcagttcgacggtctcttcgcccagcccctcgatgtccatcgccttgcggcggatgaagtggatgatgcgtccgatgatctgcggacggcatccgccctgattgggacagtagtgcttcgcctcgccttcgtatttcaccagcggcgtgccgcattcgggacataccgtgatgtactcgaacggcctgctgtctgccggccgctgcgaaagttccacgcccgtgatcttgggaatgatttcgccgcctttctcgacgtataccatgtcgcccggacgtatgtccagcagcgccatctgttcggcgttgtgcagcgtcgcccggcgtaccgtcgtgccggccagcagcaccggttcgaggttggccacgggcgttatggctcccgtgcgtcccacctgaaaggccacgctgtccaaccgcgtcaaagcctgctcggccttgaacttgtaggccacggcccatttcggggccttggccgtgaatcccagctgccgccgcacgccgaagtcgtttaccttgattaccacgccgtcggtggggaaggggagttccctgcgcgcttcgtcccaatgggcgatgtaggcgtctatctcctccgcactgcggcatatgcgcatctggtccgaaatcttgaatccccattcgcgtgccttctgcaaactctcccaatggttcgtgaagggcaggtcgtcgcccgccagctggtagagcgtgcagtccagaccgcgccgcgcgaccaccgccgaagcctgctgcttgagcgttccggccgcggcgttgcgcggattggcgaaaagcgtctccccggccgcctcgcgttcggcgttgattttgtcgaacgaggcgtagggcatcagtatctcgccgcgtatttcgaaatagtcgggccagtcgtcgcccctgagcctgaggggcactgtccgcaccgtgcggacgttggccgtcacgtcgtcgccctgcgtgccgtcgccgcgcgtcacggcgcgcagcagccggccatgttcgtaggtgagcgatatggccgtgccgtcgaacttcagctcgcagacgaattccgtggggcccgtctccttctcgatccgctcgatgaactcgtgcagctcgtccggcgaataggtgttgccgagcgaaagcatcggaaaccggtgcttcacgcttcggaactccgcggtgatgtcgcttccgacgcgtaccgaaggtgagttggggtcggccatttcgggatgcgcgcgctccagatcctgcagttcgcgcatcatggtgtcgaattcgaagtcggagatttcgggggcgttttcgacgtaatatctgaagttatggtactcaagctgccgccgcagctcttcgattctctcgcgtatcataatataattataacctgcgtaaaggtacgtattttgttcgtaactacctgcaaattcaaaaaaaatgcaaaaaaaaattgagtatgtggtgcgatatgtaaattttgcttataattgcagaaaatttccaagcattattatggctaaacagaatacgacgaagaaacatatcgtaacgagcttccataatctggcccccgaactgcaggaggccgtcaagcagaaatacccgctggggttcaccgaagcgatgatgcgcgtggacaagcccaacggagattttttctatgccgtacctttcgatacggacgaaatcgcctacatggttaagatcgacgtcaagatcgacgacaatgcgcaggaggacgacgacaaggactactacgacgacgagatcaagggtgccgacgagattcaggacgacggcaattccgacggcggcgacgactccgacgacgacgtaaacatctgaggcctatgacccgcttcgttcctctcctcgcgtttgcgcttcttgcggcctgcggccttgcggacgacgaacgcgacgacaagaacaagcgcgtatacatcacttttgcagatcccgcattcgaggcttactgccttgagcatttcgacatcgaccacgacggacgcatttcgcgctacgaagcgcagcgcgtcctgaaaatggactgccctgaccgcggcatcgcgcatatgtgggagatcggcgaattctcgcggctcgaacggctcgactgcagcggcaacgacctcacgcagctcgatttgcgcaagtgtacgctgttgcagacgctcgattgtagccgtaaccgcatcgcttcgctcgatctggacggcctgcgcgctcttctggagctgaactgcgcggacaatgcgctcacgctgctggacctcaaatccgccggagcgctccgtctgctcgactgcagcggcaaccggctcgtgacgctcgacctgcggccctgctcggaccggcttaaggccgacgcgggcggcaatcctccgctcacgaccgtctactgccgcgcatcgcagagcgtcagcgccgacggacataccgaaataatcgtccgctgattccgtatcgtctttttggttgatccgctcccgtccgatctgctcccggtttccgctcccgtccggtttctccggggcggattgtcgttttttcttcgcctgcggcatgattcagtccggcgttttgcgaatcttccgaatggcgatgcggggtctctgcagtccgtccgctctgcttgcctttccgtccgctctgcttgcctttccgtccgctctgcttgcctttccgtccgctccgtccgcccatccgtccgcccatccgtctgcccatccgtccgcccatccgtccgcttcgcccgttttggccgtttcgtctttccgtctgtttggttcgtctctccgcccgtccgcccgtccgcccattcgccctgtccccgtctgttccgtccgtcccgtctgctttgtctctccgtttgtcagctttgtctgatccctgtctatccttttatccattctgcccgcccatctgcccgcccattcgtcccgtcccgtctgcttcgtctctccgtctgtcagctttgtctgattcccgcctattcctttatccgctccgttcgtcccgccctcctgctctgacctttctgtctgctccgcctgtccacctgtctgtccatctgtctgtccacctgtctgtccacctgtctgtccacctgtctgtccacctgcctgtccgcgcttcgtctctccgctcattcgtgtccgtccgctccgtccgctccgtccgctccgcctgccccgtccgcctgctccgcccgtcccgctccggagccgccgaattttattccgccgatttcgcacagtgctttgttttttcgtcgcaggatgttttttcgcacccgatttctgatacattgttgaaaagtcgccgcggcgaattgggtatttcggataataattagtacctttggatgcaaaaaatgtcttttgcacacaaaaatacaaccggatacaatgaaaaaagttgacgttatcctcggcctgcaatggggtgacgagggcaagggaaaagtcgtggatgtgctgacgcctgcctacgaggtcgtcgcccgttttcagggcggtcccaatgccggtcacacgttggagttcaacggcgagaaatacgtactccgctcgattccttcgggcatatttcagggcggaaaaaccaacatcatcggcaacggcgttgtcattgacgccgtcctcttccgcgaggaggccgaggcgctcgcagccagcggccacgacctgaccaaacaactctgcatttcgaagaaagcccacctgatcctgccgacgcaccgcattctcgatgcggcttacgaagcggccaagggcagcgccaagatcggcaccacgggcaagggcatcggtccgacctataccgacaaggtgagccgcaacggcatgcgcgtcggcgacgtgctgagcgccgatttccggcagatttatgcacgggccaaggcgcgccacgagagcattctgcgcggtctgggttatgaatatgatattgcggaactggaacggaagtggttcgaggccgtcgaatacctcaagcgtttcaacatcatcgacagcgaatatttcgtcaacgagtgtttggctcaggacaagagcattctggccgaaggcgctcagggcacgctgctcgacgtggacttcggatcgtatccgttcgtcacctcctcgaataccgtctgcgccggcgcctgcgtcggtctgggcatcgccccgaaccgtatcggcgaggtctacggcatctttaaggcctattgcacgcgcgtgggcagcggcccgttccctacggagctgttcgacgaaacgggcgcccggatgcgcagtatcggccatgaatacggcgccgttacgggccgtgaacgccgctgcggctggctcgaccttgtcgcgctgaaatattcgatcatgatcaacggcgtgacgcagctcatcatgatgaagtccgacgtcatgaacgacttcgagaccgtcaaggtcgccaccgaatacgaggtcggcggcgagcgcaccgcgcattttccctacgagatcggcgacgacctgaaacccgtctaccgcgagttcgaaggctggaagtgcgacctgcgcgactgcaagagctacgacgacttcccggccgcattcaaggcgtacgtcgaattcatcgagcgcgagacgggcgttcccgtgaagatcatctccgtcggtcccgaccgcggcgaaacgatcgtccggtaggggagcctttgggccgccgcatgtcgcatgctgcgtatgctgcgccgaatgtatcccgcatgccgtattgcggccggagatgcggccccgtgcgcggagttttccgcctgccgcggcgtccgaaacaacgaaaccgatttaattttgtaactataaccttatgaaaaaagcacttaaaattgtcgtattggccaagcaggtgcccgatacccgcaatgtgggtaaggatgcgatgacccccgaagggacggtcaaccgcgcggcgctgccggccatcttcaatccggaggacctcaatgcgctcgaaatggcgctcgcgctgaaagaccgcaccgaaggctccacggttcatatccttacgatgggtccgcagcgcgccgccgacattatccgcgacgccatgttccgcggggccgacggcggctatctgcttacgggccgcgagttcgccggttcggacaccctcgccacgtcgtacgcgctctcttgcgcgctgaaaatgatcgctcccgacatcatcttcgcgggccgtcaggccatcgacggcgatacggcgcaggtcggacctcaggtggccgagaagctgggcctgccgcaggtgacctatgccgaggatattaccgaaatcaaagcggattcgctggtcatcaaacgccgcctgaactgcggcatggagacggtcgagacgcccgttcctgtggtcgttacggtcaacgcgtcggctcccgaatgccgtccgcgcaacgccaagcgcgtgatgacctgcaaattcgccctcgccaaatcggagatcgccgcagctcccgactcgccggccgccaagcgcgccgccgccaaggagtacctgcagatcgtcgagtgggccgccgccgacgtcaatcccgatccgcagcagctgggccttgcgggttcgcccaccaaggtcaagaagatcgagaacgtggtgtttcaggccaaggaggccaagaaactcacgtcttccgacgaggatatcaattcactgatggtcgaacttatcgcgagccacacgctcggttaaatccgcagaagtaatccatgaacaatatattcgtatatatcgagaacgagggcggcaaggtcgccgacgtgtgtctcgaactgctgaccaaaggccgcgaactggccacgacgctgggtgtgaagctcgaagccgtagtgctgggcgagcatcttgcaggtatcgagaccgaactggccaaatacggcgccgacaccgtctgggtcgccgacgacaagatcttcgcacctttccgcacgctgccccatacggccgtcatgtgcggcctgatcgaacaggagaaaccccagatcgcgctgttcggcgcgacctgcaacggccgcgacttcgccccgcgcgtatcgtcggccctctacagcggtcttacggccgactgcacgcagctggtgatcggcgaccacaaggacgccaagaccggcaaggagtataaggacctgctttaccagatccgtcccgccttcggcggcaacatcatcgccacgatcgtcaatcccgacaaccgtccccagatggctaccgtccgcgaaggcgtcatgcgccgcgagtacgccgctacgccgggcgccggcgaggtgaagaagatcgattggcagaagttcgtgaaggacaccgatctggcggtgcggatcctcgaccgcgagatttcggagagcaagatcgacatcaagggcgcgagcgtcatcgtcgccggcggttacggcatgggttcgaaggagaacttcgatctggtgttcgagcttgccgacgtgctgggcgccgaggtgggcgccagtcgcgccgccgtggacgccggctttgccgaccatgcccgtcaggtgggccagaccggcgttacggtccgtcccaaactctacatcgcctgcggtatttcgggtcagatccagcatacggcgggtatggacggttcggccatgatcatctcgatcaacaccgatcccgaagccccgatcaacaagatcgccgactacgccatcacgggcgacgtcaatgagataatccccaagatgattaagtactacaaacaaaattcgaagtaatggcaaatttcttttcagataacaaagatttgcagttccaccttgggcatccgatgatgcgcaagatcgtggagctgaaagagcgcggtttcgccgaaaaggacctctacgatttcgcgccgcaggatttcgaagacgctatggactcctaccgccgcgtgctggagatcgcgggcgaggtctgcggcgaggtcattgctccgaatgccgagggcgtggaccacgaaggcccccgcgtggtgaacgaccatgtggagtacgcttcgggtacggttcggaacatgaaggcgatcgtcgatgcgggcctgagcggcatgacgcttccgcgcaagtacgacggtcttaacttcccgctggtctgcttcgtgatggccaacgaaatggtgtcgcgcgccgacgccggcttcgagaacatctggggccttcaggactgtgccgagacgctcaacgagttcgcttcggaggagatcaaggccaaattcctgccgtgggtttccgcgggcgctacctgcgccatggacctcaccgagccggacgccggatcggatctgggtgccgtgatgctcaaggccacgtggtccgaggagaagcagacgtggctgctcaacggcgtgaagcgtttcatcaccaacggcgacggcgacgtttcgctggtgctggcccgcaccgaagagggcacgaccgacgcccgtgggctgtcgatgctggtctacgacaagcgcgacggcggcgtcaaggtgcgccgtatcgaaaacaagatgggtatcaagggatcgccgacgtgcgagctggtcttcaccaatgctccggcgcaactggtcggcgaccgcaagatgggccttatcaaatacgtgatgtcgctgatgaacgccgcccgtctgggcatcggcgcccagtcggtgggtctctgcgaggccgcctaccgcgaagccctgaaatatgcccacgagcgcgagcagttcggcaagccgatcatccgcttcgccgctgtttcggagatgctctccaacatgaaagccaaattgcagggcgtccgcgcgctgttgtacgaaaccacgcgcttcgtcgaggtttacaagcagtacggccatatcgcgcacgaacgttcgctcgaaggcgaggagcgtcaggagatgaagttctacaaccgccttgccgacggcttcacgccgcttgtcaagctcttctcgtcggagtacgccaatcagcaggcctacgacgccatccagatccacggcggttcgggcttcatgaaggattacccctgcgagcgtctctaccgcgacgcgcgcatcatgaatatctatgaaggcacttcgcagctgcaggtcgtcgcggctatcaactccgtgaccaaaggcaccttcatggagcagatcgagcgctacgccgccgccgaatacagccagcccatgcagcccgtcgttgcgaagctgaaggagctgaccgcgaaattcgcggagatgatcgcccgcgtcgaagcgggggacaaggagctttgcggcttcaaggatttccacgcccgtcgtctggtcgagaccgccggacatatcatcatcacctacctgctggcgcgtcaggccggcgagtcggaggagtatgtcaattcggcgaaggtcttctgcaagctggccgaaggcaagatttcggaggcatacacctacgtcatgaactccaccttggaggacgtcgagctgttcaaggccgttatcgaagagacggagtagtctgtccgatacgcactgtaaaaaaggttccgcctctaagggcggaatctttttttatttgtgcggttctgttattcgaataagatgatcttgcagtcggaaagttgcagaataatcagttgtctttcgtcggatagtcgagcggcgcgaaaaattcgccgagggtgatattgtaaaacttgcaaataatcgaaattgtcgtcagatttgggaaattcttgcctgattcgagttgtgcgatgcttaattccgttgcttcggccaattgttcctgcgattggtggtcgtgcatgtgccttagttccttcacccgcaaaatgattttttgaagcaattcttcgtcgcggcgttgttttttccgttccattaccctccccttgtgagtcttatttaataaattcacatattcggattattcgacagggtagtcgctctcgccgaagaattcccggaggctgatgccgtagaagcggcagagtattgtcagtgagataagggtaggaaattttgatccgctttcaaaatggaaaatatccagaccggtattttctataacgtattcctgggaataattatgatcgcggcgcaactgtttcattcgcgaaatgacatattgagccaatttttcgtccgttcgttttggtttcatctgcttcatttatacaaatgaaaggatcaatctaattttctgctctgtctatttgttcagaatgaaaattttactatctttgtgagtgcaaacagaaactccgaatacagaaattatgctaactttgcgaaacgatacggctccgccgtaacgacatattataaggttaagacaacctttacgccgttgacgaacttccgactgtttatataacaggtttatgcatggtgtaaacattgtctgaaacccttgtcatgtcccggccttgcgccgggacgggcttgggcgtaaggacaactgccatgcaaggctcggaaggccggtcaacgggagttgcacctgcgcccttgcttttttttgcgcaggccgatattaccgggtacggttcgggcaaagaattcttctagtctgtgaaatgcgtcacttgtcagccctgccgtacccgttttgcgcttttggggaatccggtagccgccgcattgccggacggatgatgcgccgaaggcggcttgggcgtttcaggttcgtttgtcgccggggtgcgttatcaattctgacggacggcgtattcccgtccgatagaaaaggggctgcacttcggagtgcagcccctttcgccgtacattaccgctcggcctatgcctttgcgggttccttttcggccatcacgcagcgcgtcgtgccgaagatattgaggttgaggtgcccggcgacataggccagcgccttctgcgccttgaccgagttgccggcttcgtccagcgggggagcgaacgccgcaacgcccatcacgcccggaactacgcccatgatgccgccgccgacgcccgtcttggccggcaggcccgtcgtgaagagccagtcgcccgtgtgctcgtagaagcccaccgtcgccatcagcgatgcgatcttcggcgccagttccggtttgaataccggctgcttggtcacgggattcacgccgccgttggcgatcgtcgcggccatcgttgcgagttgcttggccgtcacgccgatcgaacactggcgcgtgtagatgtccagcgacatgtcgggatcgtcgtaaatccggttgtaattcttcagcagccatgcgatcgacttgttgttgaagttggtcgccgtctccgatttgtacaactcgtcgatcacttcgacctgcgatccggccagcccttcgataaaaccgacgatcgacttccatttgccgtcgctgtcgccgacgggtttcaccatcgagcaggcgctgatcgcaccggcgttcaccagcggcgtcgaggggtggtcgttctccagcaggatcgccatgatcgagttgaaaggcagtcccgtcgcgtcggcgccgatcttgtcgagcatctcctgcgcgctgtactggttcatggcgagtatcgccgtcggcaccttcgataccgactcgatgccgaatttgtaatcggtgtctcccacggcgatcacttcgccgtcgggcaggcaggccgcgatgccgaagaggttcgacggcacgttggccagataggggatatagtcggcgttcttgccgcccgtttcgttcttgcagcgctcgtatgcctgctgtacggcctcgcggaccgtagcgttgtctattttttgaatcattgtccgatctgtttatcgatttatttgttgtgaagttccgtctccgaaggtttcgccgtcggttcgggagtgttcgtatgcaccggagccgctgcgacgggctgcgtttcccaatggaacggcgcgaactctgcagcagcctgcgggtccttccacgagggtttgcgcagtgcatagatgacgaacggcgcgcctacgaccaccacgcagccgataatcagcaccgagaaccatacggtgttgcttccggtcgagatctggctgggtggcacgaagctcagcacgaacgccagcagggcgccgcagaaacccatacagccgaggaaccacatcagcccgttgcccttgcccagacggaacggacggtcggtgttcttcatcttgtatcgcaggacgatggcggccgagaacatgagcatgtacatgatcaggtacagcagcacggtgagctgcgacagaatctggtagaacgactgcaccgaaggcatcaccacgaacagcagcgccagcagcgtcacgacgcatccctgaatcagcaggatgtttttctgcacgccgtttttgttggtcttctggaagaacggaggcagatagcccgccttgcccacggcgaaaatacccttcgaaggacctgcgacccatgtcagcacgcccgccagcacgccgaacatcagggcgatggcgataatcgggcctgcccacgacatatgcaggtagtggaagtagttgtcgaagcccaccagcagcgactgcgtcaggctgatgtcctttgcgggaatgatgaagcccagcgagaaggtgcccagcacgaagatgcagaccgtgaccagcgaaccgatgatgattgccttggggtagttcttcgacgggttctttacgtccatgacgtgtatgcccatcatctccatacccgcatagaagaggaagatgctgcttgccagcacgaggttgtcgaatttcgagaggtcggggaagaatccctgcgacatgtccatgtggttgtggccgccggtcgaaatgtagatgatgcccagcaggatcagcagacccgcgggaatgatcgtgccgatcatgccgccccatttgctgattttacctacccatccgagtcccttgagcgcgatgaacgtggcgatccagtagattgccagcaccatgcagagcgtgaagaccttgttcgaggccagcgccgcgtcgtgcacgtcgttcatgccgataaaggcgatcgacacggcgccgaacgtcagtacggtggggtaccagatggtcgattcgatccattgcagccagatggcaaggaatccggtgcgtgcgccgtaagcttcgccgacccaacggaaaacgccgccctgttttgtcgagaacatcgcggccagctccgcggcgaccatggccgtggggatgaggaacacgatggcggcaaacagatagtagaatgccgacgaaagtccgtagacggcctctgcgggcaggccgcgcagactcactacggcagtcacgttcataattgcgagtgtcatgacactcagtttgaacccggtacttgtggtagttttctttacatccataattcaatgaaattgagaattgattttaacggatgaaaacgttgcaactaccgtgcaaatccgccggatgaacctctttcgccgggaggatggtaggattgtagccgaaaaaaaactatatttgcacataaaacactccttttatgtaccgtattgttgttattttgcttgcggccctctgcgccgtttcgtgcggtcgccgttcgtcgcggcagcagacctccgccgctccccagatgcgggttttccttccggccatcgcgccttcgagtctctccgacgacgcgaagcgcgactacctgcgctggcattactgggaccgtttcgacttcgccgacaccctttttattcgcgaggttgatacggtacagatggtcgaggcctatgtccgctggatcgcgcttatctccgaccgtccgaccgacggcgtgccgatggattcgctcatgcgccgcgcttcggcttcgcgtcccatgctcgactacttcacgatgctggccgagctggttatccacgaccccaattcgccgctgcgcaacgacgaattctatattcccgttcttcgggccgtgctggcgagtccctattacgacgagtacgagcgtatcggcccctcctacgatctcaatatggcgatgcagaaccgcatcggcgagcgcgccaacgatttccgctatacgctcgcttcgggcgccaccggaacgctctacggcgtgaaggccgagtacgtcttgctgttcatcaataaccccggctgcccgatgtgcaaacagctgcgcgagcagatcggcggttcgccgatgctctccgtgatgatcaagcggggccggctgaaggtcgtcgcgctttatcccgacgaggacctcgccgagtggcgcgaataccgcggccatattccgccgagctggatcaacggctacgatgcgggctgcgtcgtgcgcgagaagagtctctacgacctccatgcgattccgacgctctacctgctcgaccgcgacaagcgcgtgctggtgaaggattccaccgacgtgccttatatcgaggaggttatcgaccgccggggctgactataagcagggcttatcgttctataaaaaaagacaatcgtttttatatgcgaatttcgcccctaatcgttacctttgcaccacacaaacagaatataaacaataaacattactgcgattatggcaaagaaatggcgttgtaccgtatgcggttacatccacgaaggtcctgaggcacctgagcagtgcccgatgtgtaaggtaggcaaagagaaattcgtcgaagtcgtcgaaaaggagggtgacctcgaattcgtgaccgagcacgttatcggcgacggcaagggcgccagcaaggaactctgggagggcttgcagaaccacttcatgggcgaatgcaccgaggtgggcatgtatctggccatgagccgtcaggccgaccgcgagggttatcccgaaatcgccgaggcttacaagcgttacgcatgggaagaggccgagcacgcttcgaagttcgccgagctgatcggcgaagtggtatgggacaccaagactaacctcgaaaagcgcatgaacgccgagtgcggcgcgtgcgaagacaagatgcgtctggcccgcatggccaaggagcagaacctcgacgccgtacacgataccgtgcacgaaatggccaaggacgaagcgcgccacggcaagggcttcgaaggtctctacaagcgttacttcggtaaataacggctgattcaatcggagtttccacatatttgcgagggtgaacggtttgcgtctgaaacgccgttcacccttttttcatctccctgccgtgcggtttgccggagtcctctttttctttgtttttctgtttctcagtttcccggtgtcctctttcgaactttacctgcgtgtcaggggtagctgtacgaaagcatatgtccacgcggacttgcatctgtaaggttgccgtcctgtcacaaaaaaacgccggtgcaatcccttgcaccggcgttttttcctaccttatctggatcttctgaggaacgaaaggaacgaaaacttgtcggataaccagtcatacccctccttgatccgggaagcgacctcgtagaccgtttcgatccggtcccggatgtagttcagggccgaacgcacggccagcagatagaccacggctgcgattacggcgaagaaccctccggtaatgagtgctgcgactgcgacggacccggtcagcgacgcgagccacatgacgaacgcatcgatgaagaggatgatcgcaatggcagccgtcacaccgaaaaagatcagcgatgtgacgatgtttccggttggcgacgggctatctttcatggggcggtcccgtttattcgtccttgtcgcaatcgcagtcaagaccgttgcagtcgcaatgaattttgtcaatttcatttttcagcttgcgggtgccttttttagccatatcgcggatgtcctcacggaattcgggtcccgatttgggggttacgagcatggcgacgacggctcctaccagagcgccgcccagaaaggaagcgagacaatttgcagaatgtttcatattcgtataaagttttaaattcagcaggaaatcttgcaaagtccgggccaaaacgctacctttggatgtatgaccgaagaccgccttaccaccgtcgcttttaccggccaccgcacttacgggggccaagccgctgcggctctgcgcgcgacggtgggggagttgtacgcccgcggcttccggaccttcctctgcggcatggccatgggcttcgacctcgccgccgccgaagcggtcctcgcgtgccgcgattcccaaaccgcatcggtcttttctcctgccgcggcttccgctgccgcctttccctccgttgcggcttctgctgctgtccctcccgcatcggccttttctcctgctgtggattccgtttcggccttttttccggaaccgcactctccgcacatgccgatgcccggtttgcggctggtcgccgtaattcctttccggggacaggagagccgcttcccggccgtggaccgcgaacgcttccggcgtgtgctggctgccgccgaccatagcgtgacgctctccccgtcctatcatgcagggtgttatgccgtgcgtaacaactaccttgtcgagcacgccgcactgctggtcgcgtggtacgacggttcccccggcggcacacattacaccgttcgccgcgctttgggccggggactcgaattcatcaatctccatccgcatcctgccgcactccggcaggcagaaccgacgctgttctgacactctcccgactcggaagccacgcactgtacggcgctgttccggcccgtactttctgctgtcaccgttcgacttttctgccctcgctgtccggccttttgctgttgtcttcttcctttctgctgccgtagccctccccggcctttcctttcatcgccgctcggtctttctgcagttgccgcccgtactctcgccgtcggcatacgctttcccgatggtctttcccgcattgccttccgcttcctctaataaaaaaggacggcatgcaagtgccgtccttatccgttttcgcagtatccgcgcagttattccaattcgatgcctttcagcaggctttcgatccgcaggcgggtctcccgcttgccgtaatcctttttctcgtacctgaatgtcgccgtaacgagcgatccttcgtaaagcatgtcgtaaacggcataaaccaattccggattctccgttatgtatccttcgctgcacaacatttcgcggccgtcgatttcggtgcgctgcgtcggcgcgatgaatccgcccgtgtagaaggccgaatcgcgttgtgcgcagtggtccgaaatctcatcgacggacgtgatctcctccggaatcatatccacgaccttgcccagactgtaacctatccggtcgttgtaggtgtcgaaaccgtagtaggcgtaggtttcgtccgtttcgggctgcacggtttcttcgagcagggtgtatccggcgggaatttttgccttgatcccctgcgcacccgtgtagatttgttcggtatccaccacctgcatctcttcgccgccggccagccgcaccgacaactgtcccagatagagcaatgctgcgagcgaacacgccgccagcgccgccgtgcgccagaatgccgtgaaacgtccctcctgatgctggattttcaggatgacgacgagacctttgatcgcctgaatcgcgccccagataatggcgcctgttgcgactacgtaccggcccccggctgtcgcgaaatagtaggataagaaactgaaagccagtccgccgacgcaccaaagcgctcctgcaagcaggttcttctttgcttcggccatcttctgcgaccggttgccgtccgcagagttttccgccgtaacctgtgcggcagcctcttccggcatcggttcgaacacatcgtttttgttttccggtgtctccatggataaaggtatttttaagggttagggatctaatgcggcaaagatacgggtatttttccttttccgcctgaaaaagttggaaaatcaccgccctcaaccgtcccggcccttctgccgtctccgctcagttttcctgcgatcaccgtccgttcttttgtcgttgccgtcttcctccattcctccttctttggcttctctgccgtcgccggcgggtcttgctgtcatcgccgtccgtccttttgtcgttgccgtcttcttccgttcctccttctttggcttttcttccgtcgccgctcggtttttcttccgtcgccgctcggtttttcttccgtcgccgctcggtttttcttccgtcgccgctcggtttttcttccgtcgccgtcccggcccttcttccgtcgccgctccggtccttccgccgctgtcccggtacttctgccctcaaccgtccggcctttccgtccttgccgccggctctctttcccggcctgcatgaaaaatccccggaagccgcgcttccggggatttgctgaaatcctgtttcggaaaggattatttccagttgaggatcttgtggaaatcgtactcctccggattggggacatactgtttggcagcctcgtaatccgcgggcgtgatggcgttgaggatggtctccaccaccgacgagaacttgtccgacttgatgtccaccagacggggcggaatcttgcccgtcgtgggatcctgcaggtccttgaggtagagcggacttacattgccttccgaatccacgtaaaccatgcagccggtcttgccttcggcgaagagcttgtgcacgccgatacccagctccgagcagtacgtcaggtcgtatgcgatcggggtctggcagcggatctcgtaacccagctccacggggcggctcttgaccttgatgcccagctctttcaccttcttctcgatcatctcgttgaagatgtgcgccttcgataccttgcccagttcggggtgtccgtgctcgtcataggtgaagtggatgccgctcttgcggatctcctcgtcgctcagcgcgtggaatacgccttccgagataacggcagctccgtagtccatgcccatgatcttgcgcttgatgatcgacgaaatcacgaggttcacgatcttctcgacggtgatttccgtcttgtcgaacatttcgggaatgacgatcatcgggtagtggcaagcctcgccgatgccgaatgccaagtggccggcgctgcggcccatggcagccagtacgaaccagttgccgctcgtgcgggcgtctacgtagacggcacgtgcgataacggcgcccttgtccttggccgactcgtaaccgaacgtcggcgtgcctttcggcaggggcaggtcgttgtcgatggtcttcgggacgtggatgttggcgatggggtatttcttggcctccaagaacttggcgatgcggttcgcggtcgaagccgtgtcgtcgccgccgaccgtcacgagcagtttgatgttgttgtcggtgaagaacttgaggttgaagttgttttcgaaatccgaatccttgggtttgaaacggctcatctgcaggaacgaacctccctgattgaagataccgtcggccatggggtagtcgatgtccacggttcggggcgaggggttgaacagtcccgtgtagccttcgtgcaggccgattacgcggtaacctttgcggaggaaggtctttgcgacgctgcccacgacggtattcataccgggtgcgggtccgccgccagtcagaattgcgattgcttctttcatggttgtgtttgggtttttatgtttgaacctgaattaacctaaaattgacgcccaaaagtacgattattttttcaaacgggcaaaaaaaagccgtttcgattgaccgatgcgggccgtgtaatgtctttacggaataaataggagcatcctgcgatttgcaaatcgatattttttctatattgcataaccatattgcgtctaactctcacatctaaaacctgttgtttatgagaaaccatttactgccattgtgcgtgacgctcttcctgatttttgccgggggaatgactgccggctgcgataagttggatgataaatacaagtcggaaaaaacgatcacgctcaccatcgcttccgtcaagcccgctgctgccgatgacgactatgattggttgcaggggttgcctgtctatatttacaaagaggagagtccggactggcggttgtggtattcgcatgatccgatccggggcttcgatgaaatctatgaggagggatatgaatacgtagtcaaagtccggagactgacactggccgatcctcctcaggatgcaggcgcatatgtatacgaattgaaaaagatcgtttcaaagacgcaaaaggattccgaaggtgttcccgaatcctatcttcggtgaggagaggaacgaaaaacggtgttcggatcgtgtccgaacaccgttgaatacataaaattcagtactgatgaatatgctgagtttctgttgctcttattccctgaatttagagaacgccgtggggcttactcaattaccgtaacgttcacagcctgctcgcctttggcaccgctgccgacttcgaattcgactgcctgaccttcgttgagcgacttgaatccgtccgttacgataccggagaagtgaacgaaaatctctttgccgttctctcccgtaatgaatccgtagccttttttgctatcgaaccattttaccttacctgtcataaaaattgaaaattaaatagtttgtacagggcaaagtaaagtaaaaatcactggctttcaaaactttttggcatgtttttttcaggttcggtcgaaatttttttatctttgctctgtaacaatgaccttaatgacgatgcgatatgaataaaaaactgaaactcgctctggctgcgctgcttggcttttcgactgcctgctcgacggtcaaaaacgctccggcgaagggtgcagaggaacagaagcaggagaccggatcgcaggagattcaggactcggtgaaggtgccgccccgcattgtcgtcatgtacggcgtgcgtcctccgggacaggccggacctgctacgggcgtgcatattcccgatgcgaaggtgcagtccgccgaaccggaggagctggatcccgttgcggagaaaccgaccgaggatacgcccgtcatggacacgaagaagggcgccaaggctcctgagaaataatccatggcgcgccgccgtccgggcctgcgcaaacggctggccctcaatatcttttccgatctctacgcttcgacggtcgccgagcaccggctcacgacgctcttctgggagtgtacgctgcgctgcaacctttcgtgccgtcactgcggcagcgactgccgcgtggaccccggtgtgcccgacatgccgctcgaagacttcctgaaggtgctcgacgaggagatcacgccccatgtcgatccctccgaggtgctgattatcttttcgggcggcgaggtgctggtgcgcgacgatctggagcgtgccggagccgaagtcacccgccgcggctatgcgtggggcatggtcaccaacggcatggccctgaccgaagcgcgcttgcgaagcctgctcgacgccggactgcgcagcgtttcggtcagtctcgacggcttcgaacgcgaacacaaccatatccgcggcaattcccgcagttacgaccgcgcgctggcggccctgcgcatgatcgtccgcgaaccctcgctgacctacgacgtggtgacctgcgtcacgggcgccatggtgccgcagctcgaagcgttccgcgacatgctgattgccgagggcgttgcatattggcggctcttttcgattttccccatgggccgggccaagaacgatccgtcgctgcgcatgaccgacgcgcagttccgcgaaatgctggaatttatccgccgcacccgcaaggagggcaggatcgggaccagctatgcctgcgaaggcttccttggggactacgagaccgaagtccgcgattacttctaccaatgcgccgccggagtctcggtggcttcgatccgtgtcgacggcgccatttcgggctgcacgtcgatccgtgccaacttccatcagggcaacatctaccgggataaattctgggacgtgtggcaaaaccgcttcgaacccttccgcaaccgcgattgggcgcggcgcggcgcatgcgccgactgcaagatgttccgctactgtctgggcggcggcatgcacctccacggcgacgacggcgaactgctgtactgccactaccaccgactgtagatacaccgtatcggaattatcatcctgatatgctgctgcgaatcgttacacgctctttgccccacatctgtcgtgaaaggcgctcaaagcctgctttgggttccggtttttgccgactaactgcactgcggcaacacttccggcggcggatagccgcttattgtcttcgcgtgaatctgaaattaagccgttcggggcgatgatttcacgaaccgcctgcaagaccgattttgggacaaaagtttgccggaaagaaaaaagccgctatctttgcatcccggaatcgtgacggttcccccggccggaagagtccgggattgacacgaaaagccctgcggggccgatgtaaggccaatcacgggttgcagggccgggaacgacggggtgtagcgcagtccggttagcgcacctgctttgggagcagggggtcgtgggttcgaatcccgccaccccgacatgaagaaagttgctgtgaattaatatttgcagtgactttttttttgtttgggtatagtactgaaacaacgccgttttcaggcaaatttcacacaaaaacggcaatcggacaccaagcgcggtctggggccggaagttacagtctgtcggaagtcgtgcgaggaaacgggaagcaggtacgatcggatcggaaagggcctaagcagggcggaagataaaagaagcgcataattttgcggaaataattttgtcttttcagattttcgacttatctttgtgcgctcttaaaatgataagggtcccaaatgttcggggtgtagcgcagtccggttagcgcgccagcttcgggagttggaggtcgctggttcgaatccagtctccccgacaaattgtaaaaggtttagaatgaggaatctcattttaaaccttttctgcatatatcccgctctttatcggccgggggcccgttttcgctctctattcggccggaatatacgcatcggctccggccgcaggcggagttgcttcgcttgtcgaaccggctgcttccgcagctttttccgaagactccgtcccgtgcgaccgcaatgggatttgtgtccgtcgccgtatccgttgccttgccggttcccgccgcttctctgccggggcggatgcggccatgtgtcgaatccgcctgaacattcccggcgatatcctgcatccgtcacggcatccgtcacggcatccgattctgtattcagttctgtatccgccccggcatcctactctgtatctgttcctgcatgcgttcctgcattcgtctcggtatccgattccgtatttgtccttgcatctgtctcggcctccgtccccgcatctgtaccagcccctgcgtcagttcctgctcccgcgttgccgtcgtccgcttcgacctccacggtctcgccgtccacttcgagggcgatcgtgtaacggtcgcggcccgcgtaattcggcaacgccagcgaatccatcgtctgcacccggaacgccggagccgtcgcgccgtgcgtggactgcatgtagtcggtcagcgccttgttgcgtgcggccatcatgcgggccagctgtccggcggctttttcgcggtagagcgccagcgccttgtcgtcggacgaaagtccctgcggcgaaattccccgctgggcgagcagcgaatcggcaaaggacatgatcgccggagtgcggatgtcggtctgctggatcttttcgtattcgagcatcgacataggctggcggccggtcgtgtcggcgctcttcagatgctcggcataggccattcggagcgcgccggccgcctgccggggcagggcgcggcgcatgttgacgcgctgcgtcaggacgatgtgcatgtcgggcttgtcctgcaatgcctgcgcgatcttgtccagcgaagcgtactgctccgacgtgaagacgtattgcagcgggtcgatattgatgtattcgaggttctccttgttgcccgacaggaacgagaagggcgccgtcacgactttcagcaggacgttgccgatcgccttcagcacgatcttgcggtaggagaactccggcgaatcgagactccccttgaccggaaggtccatcttcacatggcctttcttgtctttcaggacgtatagcccctgtttgagcggaatattcatctcggccttgatctccctgcgttttttgtccaccttcggttcgaacatgtcgaggtggttggtgccgtcgaggtagcggttgcggattacgttctggctgcggaacgtgaggttgcccttggtcagcggataggccgtgtaatgttcgcagtagggaccgaagtcgcgcaggtcgaggttggtgagccaaagcgtgatgttctggttgttcatgtcgtcgagcgtcccttcccagcgcagcttcgccgagccggtcttctgcatccgcgcatcgacggtcatgctgttgcgcttcgagggggcgaaatcgcggctgcgcatgcggatttccgagacggtatattcgaacgggcggtgcatcgtcaggtcgcgcaccgtgacgcggccgttcgtgatttcgaggtcggcgatccggagcgtcggactcggcgtcgcgcttcccgcagtgtcggacgtcgtgatttcagccgccggggcgggattcgcagcagtcggggcaggcacggcagacgtcgtgatttcagctgccggagcgggggctgcttccggagcgggattcgttgccgcagaggcggaaacggtggtcggcgaagcggtttctgccgccggggatttcatcagagcggcgagattattaccttcgggcgtcatttcgaacagcgccgagagtcccgaaacgtagatgcggtcgaagacgaagcgcattttgcccagatcgccctcggcgagttttacgcccagcgtatcgacgcccgccacgggccgctgctgccggtcgcgcagggcgaagcccgccagcgaagccgtaccctcggtcgtgagcgaaagcaggtgttccgtgttgccgcgcaggcggatgtcggccgacaggcggccgtccacggccgtgacgtcgagcgactgccggaaatagggcagcgtgcccgccagtgcgaaatcctgcagccggattccgatgtcgaattccgagctttcgatgttgtagcccacgtcggtcgagagcgaaccgccctcggcgaagttgagcacggccccgacgtcggttttctcgccggagaaatagacgcccggaatatgcaggttcaggtcgttcatgccccactcggcatcgagcgcgaggtccttgtaaaagaccctgccgttgcggatcgagatgtcgtaaatcccgatttcccacggcttcgaggttttttcgggcgttgcggcgacggctgtcgtgtcgcccgcgaagcgggctgtgatgtcatcgaaactgaaggcgttgccccgctggtagatcttcacgtcgggacctgcgaacgagatttttttcacgagcacacggtttcccagcagcggccatagccgcatgcgcatctcgaagctgtccagtcggaaaaacgtcgtcgaatcttcgcttccgccgatgcggagtccttcgatgcgcaggcgtccggtgaaaatgttcatccgcagccgctccatgcggatcgagcggccgatcagttcgcggtcgtgtttctcgatgtagttcttggctacgggcgaaacggcgatcgcagctatgacgatcagcacggccaagacggccgcggcgatcagcgtaattttaatccatttcttcagggttcgttctgtttgtggtcagtgcggcatccgggaaatcctccgcagccgccttgtgtcgtatcgttttcatttcaggtttacgcgatcttccgcgaagcctcccatcttacgtccgggcgttcggaagccgacccgaacgctgtcggagagctgtcagcatgttgtcggaccgctgtcggagagccgccagccccctgtcgcatgcttccgggcggcttcgggacctccgccggaaatcaggccgtgcggttggcggctgcgttcgggaatctccctcccctgcgatccctcagcgtgttatctcctcgaacagatgcccgaaatcctctcccggcgcgggcatgtagacggcgaagcccagcgcctgcgcggcgtcaacgttcttccggccgtcgtcgatgaagagcgtttcggaggggatcacgccgctgtcggcgatcaccttgcggaaaatcgcctccgaaggcttcagctcgtgcagttcgtacgaaaggtatatcttgtcgaaatagtcgtccatcgtatgcccgtcggccgtaaacgcgccgcggatggcgaccatcgccgccggattgttgttcgaaagcacataggtgcggacgcccgcctcgcgcaaacgcatgatctgccgcagtttggcgaccggaatccccaccagaaatgcgctgtatgccgccgcgatctcggaatcggtcacttcgggccgcccgtccagccggcgcatctcgtcgcaggcttcgcggaacgaaatgtcgccccgctccagccggccgatcatctcggcgggatagtagggattgataaggtcggcgacacggggcatgtccaatgcgcggaacgcggcggtgcagcgctcgatgtcgaggtccacgaggacgccgccaaggtcgaatattacgtttttaatctcattcataagctgttgtgatttttgttcttgcacggcctgccgttacggccgccgttttgccggccgttgcatctgctattccgccagccgtttagtccgtcgttgcgccagccgttccgtcagccgcttggcttccgatcgtggcagaccgcgggccgtgttatttctggaattgcatcgtgaacctgcggatcggccgcagcacccacatcggcaacgctttgcaaaggggaatccatgcccggttccaccagtcgggcacgatgcagcggcggccccgccacaaagcccgcagtccccgccgcgcgcagttgtcgggcgtgataagcacgccgagccgtttgccgatgcgctgccagcggggcgtcagcccgtaaaggtcggtcgccacgcctgccggacaaaccgccgtgacgcggatgccgcggtcgcgcacctccttggcgaaagccaccgagaacgaccgcatgtaagccttagacgcgctgtacaaagccagccccggaaacggcatccacaacgagtaggaggacatgttgagaatgtacccccgcaccccgcggcggaccatgtcggcggcataaaggcggcagagctgcgagacggtcaggtcgtgcagcaggatgatgcgttcgatacgctcggcgggcgtcgtcaggatgtcgcagaacgagaagatgcccgcgttgtttatcaccacgtcgatttcgatcccttcggccgctgtccggtcgtgcaactcctgtgctgccccgacccgcgcgaggtccatcggcatgacccggacttcgggaaaggatgcggaagcgttcgcccccgccgcacggcgtatctctccggccacggcttcgagcggcgcggcgttgttgccgacgatcaccagccggtagcccagcgccgccagccgcagggcgtaacagcgtccgatgcccgatccggctcccgtcaccagcgcccatgcgcttcccggccggacttcgccgcgcttcatccgccgggaatgccgtgccgtctcctgcccggtgcggatgcccggcgccgttcccgtcgtctcttgcacggcgcgggtgcccggcgcgccttcgccgggcgtatgtcccgattgcttgtccatcgggtttgtgtcgttcttatgttccatgtttacggcagttttgccagctcttcgcggattttgcgcggcaggtcaccgcagtgcttgcagcacttcatatccaccgagtacatgcgcgcgatgcagtagttgcggtggtcgcactcgctgcgggtcgcggcgtcgccctcccgaagcttgttgacgaacgcagggtcgttgaccagcgcccgcgccatctgcaccagttcgaatcccgcgtccagcgccctgtcaatgccttcgcggctcaccagcccgcccacatagaccagcggacacttcagctcggcgcggaacttcttggcgtcctccagaaaatagcactcctcgaacgggaactgccggatcatccacggcccgcaccagcggatgaagtaacgcagccacagcggcgagtagtagctcatcgtgtagatcggaatcagcccccgcatcacggccatcggggccttcgacacgaatccgcccgacagcacgatgccgtccacgccgaaacgctcgatctcgcgggcgatttcgagactttcggggatctcgatgccgcccttgaatccgtcgtacatgttgtgcttcaccaacacggccgttccggtctgcgccgcggcttccatgacctcctccagacacatccgcatgaaacgcatgcggttttcgagcgatccgccgtactcgtcgcggcggcggttggtgtagggcgaaaggaactgcgaaatcaggtatccgtgcccggcgtgtacctccaccgagtcgaatcccgcgtcgtgggccgtatggacggcccgcccgaagtcgcgggccacctgctcgatctcgccggcccgcatgccgcggaccggcgtgtaggcgtagaggttgaaacccgtggacgcgccgatcggaatctgccccgcggtggtcaggtgggtcatgttgccgcagtggccgatctgaattcccgccgccgcgccttcgcggtgcacggcgtcggtgatgtcacgcagccccggcacgatttcgggccgcagccacagctgcttgtcgaacgaaagcccgctgcggcagaccgccgcataggccagcgtagtcatgcccacgccgccgcgggccaccgatacgtggtaatccttcaactgctgcgtcgggccgaaatggcggcccatcgactcgaacgccgccgaacggatcgtgcggttgcgcagcgttacgggtcctaacttatagggggtgaaaagcgatgacataatcgggtcagtaaatgaaaggtatgatctttttgcgtccgagcgacgtgaattcgtcgccgaactccttggcatagcgtttgttgagcgatgcggcgcggggcgcgaggttggcgaaggtccaccacgcgaacaccgctccggcccacgaccacgaagccacggcaaagcccgtccattcgagcagttcgccgaagtagttggccgacgagacgtagcggaacatgccgccgcgcggaatgtagtggcgcgtgtcgcccggccggcgcaggttgcggatgatgtgatccgaatggagattcacggccattcccgcgaggaacatcgccccgccgatataaatataaggttgcgcgaaccagtcggcgtagtagccttcgggcgagacgtagaagatccacccgccctgcatcagggcgttgagcgtgttgaagcacatgcccatcaggacgatgccgagcggcattttcgacgcgccgcgcatgagcagcggaaagatgaacgcccgttgcaggtagtgggcctgaaagagcgcgaagagcgtcagcggcccggcttcccacgtcctttcggagagcagccacagcacgcacatcgccacgaatacgggcgactccatcagcacccagccgatcttgttgggcacgggcggcccgtatttggggttgaaaagatagccgtatccggcttcgaaaaaatgcagggcagcgaagaccaccaaggccagcagcgccatgacgatcaggaatatatcgaatgtttgggccatatcggaacggtttcggtaaaacggcataaagataataaaactttcccgctccgacaagtccccgaaagggccgtttttgttctttttgacagttgggaaacgggtttcctcccgctttttttgcactcttttcgcggcccatgacggctctgccttcccacctgccggctttctcgtttttcggcggttctctttttttctccggtggccttttttgtcccgttgctgtttcctcctcttcccgccagcaaactttctttttcttcggcggttctctttttcgttcggcagtcttttttgtcccgcaacggtttttctcggtgtttttcagggtagggggaggctgcatttcgcccgtctctttttcgcggcttgaaatattgcaagaggcctgataaaaaaggcggccgccgctgtatgcggaagccgcctgtcaagttcccgtggcgcccggaaagtgtgcgtgtcgcggtcgtgcccgccgatcccccgaaatcggaccgaagccggaagtgtgctctttcgaccgccgtgacggggcgcagaaccgtgaaaacgagctgcctgcgagaaagcgccgcctcagggcgcacgggagtttgatgtggtagccgaaaccccggtcttgcctgccgcggaacgggctggatcgaccttttccgcaatctctgcgacggactccggggcgtgtcggcgcaccgggacaaaaacccctgccgaagcaggggcgccggaagcgacggccagccggcggcgtcccgccgttgactgaacctcaataaatgggagtctttccgccttccggctgtaatgccggtccggaaaccggccggaagtccggggcgaaccccggaccgccggtccggatccccgattctagtgcgtgaataccttgcctttctggtgttccatgttgtcgtacttgatgcgcgacgtagtggggtattcgagctgttcgaactctgcgacggcgttgcggatgtcgcccatcagcatgtcggccatgtcgcgcgacatgccctgacgtaccacgatgcgcatcacgaccacgttctcgatgttcttgggcatggtgtacgcgggaaccatccatccgctctgctgcagtttggcctgcaggtcgaagagcgtccatttggccttcttgtcgtattcgggatccatcatccagatgaagagcggattgacgacctccttcgagtagttcttgaagcacttcatcgtgccgatctgctggtggcagtacttggcgacgtccatcgagttctgctgaatctctttgtagccctcgaatcccagccggatgaaattgtagtactggcccagaatctgcgccgcgggacgcgagaagttcagacccacctgcgtgatgttggctccgaggtaattgaccgagaacgacatttcgtcgggcagatacttcttgtccttccagaccacccagcccagacccggatataccagaccgtatttgtggcccgacgtggagatcgacagcacccatttgaggcggaagtcccacttcttttcgggtttgaggaacggcaggatgaaaccgcccgacgcggcgtccacgtggatcggaatttcgtaacccgtcttggcgttgtattcgtcgagcgccttgtccagcccctcgatgtcgtcgtccagacccgtccacgtcacaccggctatgggcacgatgcagatcgtgttttcgtcgcacatctccagcgcctgcttgggatcgagcgtgatgtgatccagcgtcaggggcacggtgcgcagttcgatctgccacagctggcagaatttctcccatacgacctgaaatccggcgctcatcaccagattcggcttgtcgaagggtttgcctgcggccttgcggcggttgcgccagcgcagccatgcggccacgccgcccagcatgcaggcttccgacgaaccgatgcccagcgctccggtcttccactcggccttttcgggggtgttccacagattggcgacgatattcagacagcggccgcacatcaccgcgacacgcggatactccgtctcgtcgatatagttgacgttgatcgcctcgttcatcaggcgcgtggcgtaatcatccatgtaggtcgtcacgaaggtggccagattgagccgcggctgcgtctgcggataggtttcgtccttgactaactggtaggcgatttcgggcgatgtcttgcctttggggataaactccgtgggcgcgggattgcgcatctcttccgaaccgaaaatatcggtcagcgtgtcctcgttggtgtgtctttgctgattcataacgtaaatttatttttggtttacgagcatacgaccttgcatgaaccgtgccgtggtgaggttgcccggacctgaaatccggcgtgctttttttgcctgaaaacctccgtctgcggcccgcaagcccctttccgctttgtactcaacctgctgccggaccaacctcccgcgggtgatgccgttttcggctccgaacggttgattttttttgcatcattccgtcctgttctgttcccgtttctgcttgtttgcattccgatcctgccccccccctgaaaaaagcgggggaatatttggaatcccggaaaaattcgatatatttgtgatatcaaaataatatcacctaaaacttacggatatggagaatggaaattttgtctacaagggctggaaatgcaatggttttctggctttgacgctgatcttcgtcgggttggcgctgggtgtgtgcgcgatcgtgttcggcgcgcagcgtatcgacgcagggctggcgttcggcgtcgggccggtcgtgatcggctcggtctggtgtctctgcatgctgatctgcatggcgggcttcatgctgctcgaacccaacgaagcccgcgtcatggtcttcttcggcaaatacaagggcaccttctacgaaacgggctactggtgggtcaatccatttatgtcggccaagcagatttcgatccgcgcccgcaacctgaacgtcgatccgatcaaggtgaacgacaagacgggcaatccgattatgatcggtctggtgctggtgtggaagatcaagcgcgacgatatctataaggcggtcttcgagatcgacgctccgacgactgccggacaaaccggggtttcggcttcggcccgcatgaacatcctcgaaaatttcgtgggtgtgcagagcgacgctgcgctgcgtcaggtcgccggttgctatgcttatgacaataacggggttaaggacgatgaattgacgctgcgctcgaatagcgaggcgatcaacgaccagctcgaacacacgctcaacgaacgcttggcgatggccggcatcgaggtggtcgaagcccgcatcaactatctggcctatgctcccgaaatcgccgccgtgatgctgcgccgtcagcaggccgacgccattatttcggcccgcgaaaagatcgtcgagggcgccgtgtcgatggtccacatggccttggagcgtctgggcagcgaacatatcgtcgaactggacgaggagcgcaaggcggcgatggtcaccaacctgctcgtcgtgctctgcgccgacgaagccgcgcagccggtagtcaatgccggaacccttcaccattgatttaactgccgatggctaaagagaacaataacaagagtttcgtgcttcgcatcgacgccgcgaccatggaggcgctcgaagggtgggcggccgacgagttccgctcgatcaacgggcagctgcagtggatcatcgccgacgccctgcgccgcagcggccgcctgaaaaagccccgtcccgccggaccggagtccggcgattcgacggggcttccgtcgggcgatgccgcttctgcaaaacccccggttccgccccggagcgattatcccgacgatatttaaccgatacgctaattgatatgtgcaatctattgagcaaaaatcgaataggattgtgtggaaaactccgtggctcgcaatcagaccggggcatgtccgctttgcgtccggggcggggcatgtccgctttgtgtccggttcggagcgtgtccggtgtgcgtccgggtcggggtgtgtccggtttgcgtccggggcagggcatttccgctttgcgtccggttcggagcgtgtccggtgtgcgtccggggcggggtgtgtccggtttgcgtccggggcagggcatttccgctttgcgtccggttcggagcgtgtccggtttacgtccggttctgggtgtgtccggtttgcgtccgggacggaatatgtccggtctgcggtatgggcggattgtctccggtttgcaggtcgtgggcggactgctggtcttttttctcctgcttcggcccgactggctgccccgctgggtctattggggtgtgctggcgctgggcgccgccctcgccctcggcgaaatggcgctcgattaccgccgccgtcgtccgcgccggcggtggcgcgatgcggggctggtgctgttgtcgctttcggtggtctggattgtcattttgccgccgttctttttctggggagtctccggcgagaaggagttgacccgcgccacgctgggattgggtgtcgctgcgctcgtcgcatgcgtcgtctgcctgctgcgctggcggcgtttgcgcgccgaggctgaaatgcgcctttggaagctgaaagccgaacgccgaagacgcgacatgctttgcgcccgtgccgcggcggaaggaggtgggcgatgagactccggagatggttttatgcgattgcttcggtgtttgcggtcgcgctggtgatgttcccgctcaattttttgtgggtggggcagtcgccgctgcatgcggcggtaagttccctgctgttcggcctgcccgcattgctctcggcatggacgcccaaggagcggcgtaccggcaggcgcaacgaatcccgtgggactgccgtgtgtgcgcaatcccgcagatgtgccggagccggcatccatgccgcacctgccgggcgtattgactccgccgcgaatgccggggccgccatgccagccggggtcgcaaggtgcagcgaatccgccggtcgtgccggcgctgaaaggttcggcgaatccgctgcgcatccggaatcctgcggccgcactgcgtccgcggacggcaccgaacccgcccggcggaaatccctgttgtcgaaagccgcgctggggatcgctttttgtgtgctggcggcgatgctggcgtacgatattgtgaccgaaggcgtggccgtcggtgttacgaaatcggtcggattcgtcctgttgatattggttgccgcattgggaagtagattgggttacctaaagttttagtttatgaaaagaatagtcgtttttacgggcgccggggtgagcgccgacagcggccttgccacgttccgcgattcggacggcctgtgggccgactaccgtatcgaggatgtctgcacgcccgaagccttggcgcacaaccgcgccaccgtgatcgaattttacaacaaacgccgccgcgagatgcttgccgccgagccgaacgccgggcatcgggccatcgcggagctggagcgggatttcgaggtcgaggtgctgacgcagaatgtcgataacctccacgagcgcgccggatcgtcgcgggtgacgcatctgcacggcgagctgattcgcctgcgttcgtcgcgcgattccgggctgatcgtcccgatcgaagggtgggagcagcggctcgacgccacggctcccgacgggtcgctgctgcggccgcatatcgtctttttcggcgagtcggtgccgatgttcgaacgtgcggcggagatcgcgcagacggcggatatcatggtcgtcgtgggtacttcgctggcggtctatcctgcggcgtcgctggtgcgttacgtgcggcccgacattccgatttacgtcgtcgatcccggcaatcccgatacggcgggcatccgcaatccgctgaccctgatccgcaaacgcgctgccgaaggcatgcccgaactggccgccctgctacgggaacgctatgccggatagatagggtgttgctacgaaagagggtgtctgcactgcggcagacaccctcttttttgttcgtatttctcccagaagtttccgcaatccgcagttcgcgcggcgtgcgtcggccggaggactatttcaggtccttgaaatagatgtccagcagctctttggcggcgatgaacgacgagatcttgtcgtccagcacgcgctgttcgtattcggcgatgcgcgattcgaccgcgggatcgtggtagaacgagttgcgcagcacttcgttgatcgactcgtacatccagtatttgttctggcggttgcggttgtgtcggaagtagccgttggcctcgatgtggtcgaggaactcctcgacgcctttccatacctcttccagtcccgttccggctacggccgagcaggtgtagactttgggccgccagcccgattccggcagagggaagagccgcagcgccccctgaaactgggttttggcgagttcggccttgtggatgttttcgccgtcggccttggtgattaccatgatgtcggccatctccatgatgccgcgcttgatgccctgcagctcgtcgcccgcgcccgaaatctgcagcagcatgaacatgtcgaccatcgaatgtacggccgtttcggactgtccgacgcccaccgtctcgatgaagatcacgtcgaatcccgcggcttcgcacagcacgatcgtctcgcgcgtcttgcgggccacgccgcccagcgatcccgccgagggcgaagggcggatgaagacgtcgggattgcccgaaatgctctccatgcgggttttgtcgccgagaatcgagccgccgctgcgttccgacgaagggtcgatggccagcacggcgagcttgtgccgcagcgaggtgaccatgttgccgacggcttcgatgaaggtcgattttccggctccggggacgcccgtgatgccgatgcggaccgatttcccggcgtgcggcaggcagcgctcgatgatctcctgcgcctgcgcgtagtgcgcagggttgttggactcgatgagcgtgatggcctgcgaaagggtggtgatgttgccggcgagaatgccctcgacgtattggtcggtcgagagcttcggcttcttgcggcgcgtgaagtaagggtttacgatcggctgatcttcaacgccttcggtgacgttcagagccgtgtcgtggtgcatgtcggcgtactctttttcgtaatggtttatcttggtgaaagacatgttgttatttgcttgatttatcgatgatttcgggtgtcaggtgaagtgaatttccctgccagagcgccctgtttttggaatcgaccagcaccccgaacggaacgtactgcacgccgaacgccgtgaagatcttgcctccggcgtctatcgccacggagatttgcggcgataggtagggtctgagcagggggcctattttgtcctctttttcctgcgttatgacaaccacgcgcagtttggtacccaatttgtccgtcatcgcccggagctgtttgagcgacgtgatgcaggccgcgttcgacgactggaagaactcgacgtaggtcagccgcggcgtggccgcgggtttctgtccgtcgagccatgcagggactttcagttcgggcacacgctcgcccagagcgatattctgcgcgtcggccgccgcaaaaggcagcagggccgcgaggagtaaaataagcagtattttcttcataagagcggacttattttttagcgaagataacaattatttgccacatagacgaaattttttacttggacttatgaaaatcggattcgacgacaccccggccgcacctgccggaacctattcccaacaccttgccagacttttggccgagtatgccccggagcatgaatatatcattgacggaaagcgctgtaaggagttcgacctctaccacggcttccggcccggacttccctttccggtgctgctgcgccgcataccgtgcgtcatgacggtccacaacctcaatttcctgcgctacccgcatctctattcgctgggcgagcggctggtgctgctgcgcctgtaccggcggatgctgcgttcggccagccgggtgattacggtcaaccgcgacgcgcgggaggagctttcggaccggctgcggatcgaccccggcaggatcgaggtcgtgatgccgctcgcggcgcgtatgccgcagaatccgcccgacggcgccgagctggaaggcgtgcggcgcaaatatgcgctgccgcgcgatttcgtgctgatgctggggacggtcgagccgcgccacaatcaggaggtgctgttcgaggcgctggccctgctccgggagcgggagcgcgagatgctcgaaacgagaggggcggagatgccgacggcagcggaacggactgaggtgcgggctgcggagcgaaccggggcgcaagccgggatgcaaagcgggacggaagctgggacagaaaccggggcggaaaccgggactgaagctggggcggaaactgggatgcgaaccggggcgcggaccggggaacaacctgcaggagatgctgcggagcgaaccggggagcgggcagccggacggaatgtggaatcggttgcggaagagggggcttttgcggagactgttgcgcgatccgtgcgggagccggacggcggcggggacctgaatcctgaaaatgcaggctggcgcgacgatacggcgtcggatggcgtcggagggtacggcgacgtggaagccggagccaggttggcgatgcgcggcgtcggtgcggacactccggatgcgaaccggaatacggtcgcggagttcgccgccgccggtcgggagcatctccggcccgcggacggaaccgcacggagcggcggcgccgaaaccgccgaaaccgccgaaatcgccgaaatcgccgaaaccgccgaaaccgtcggagtcggcgaagccattggagccgcggaccgcggtgccgacatgtcggtcggaggtgtctgccgcagtgcccgtacatccgtcggagatgcgggccgcgacgtcggtgtatccgttgcggatgcggggcgcagtgacgccgccgttgccgcagggcggcggggcgctgccggaaccgacggccgacctccgctgccgcagcgcgtcggagttgtggtgtgcggccgccgcacggcgtatgccgacttcctgctgggctatgcacgtgagcggcatatggcggcgcgggtggatttcatctacgaactttcgcccgaagacctgccggcgctgttccggctggcccggactttcgtctacctgcccgacgccgaaatcgaggcttcgatcgtgcccgtggtcgaagcgctgagggccgggctgccgatagtgctgagcgatacgcggctcaaccgcgaagcggccggagacgcggcagtttatgtcgatcccgaagcggtgggagaggtcgccgcggcattggaaaacgtgctctgggacgagaccttccgcagcgaaatgcgccggcgcgaacgccgccgcgccgagcttttttcggaatacgccgtcgcccgccgtctgatcgatatttacacttcgttgtgaagcgcgcggccggcccgaaaagtgacagatattccgaaaaaaatacgataaaaggcttgggtatttcgaatttaatgccctatctttgtgttcgttttataacagtgccttgaaatgacacggaacatccactaacttaaattaatattttgctatgaaagtttctcatatcgagcatcttggcatcgcggtgaagagcctcgatgaagcaattccctattgggagaacgttttgggcctgaagtgctatgccgtcgaagaggtcgcagaccagaaggtccgcacggcgttcttcatgctcggtcagaccaagatcgaactgctggagcccacttcggaggagtctaccatcgccaagtacatcgaaaaccgcggtgtcggcattcatcacatggcgcttgcctgcgagaatatcgaggagcagctcgccgacgccgaggccaagggcatccgcctgatcgacaaaaccccgcgcaagggcgccgagggcatgaccatcgccttcctgcaccccaaatcgacgcagggcatcctcaccgagctttgcgagaataagaacaaataggaacaacgagcgttcgtatcgctccctcggccccgttttttacgccgccgccggcgaagaagtccccgccgaggcggggatttgggggtgggtcagaccagtaaacgcggccgacggccgcggggcgggacagtccggaacgaacgtgcatgaaactatactaacaagcatacttatgagtgaaattcaaaacaaaatcaaccagctcatcgagaaccgtgccaccgcacgtctcggaggtggtcagaagcgtatcgacgcccagcatgccaagggcaagttcacggcccgcgagcgtatccagatgctgcttgacgaaggctcattcgaggagttcgacatgttcgtgacgcaccgctgctatgatttcggcatggacaagagccacaccttcggcgacggcgtcgtaacgggttacggtacgatcgacggacgtctggtctatgtcttcgcacaggacttcacggtaacggccggttcgctgtcgctgtcgatgtcggacaagatctgcaaggtgatggacatggcgctgcgcaacggcgcgccctgcatcggcatcaacgattcgggcggcgcccgcattcaggagggtgtcaacgcgctggccggctacgccaacattttccagcgcaacgtgatgtcgtcgggcgtgatcccgcagatttcggccatcttcggcccctgcgccggcggcgccgtctattcgcccgcgctgaccgacttcatcatcatgaagaaggagacgtcgaacatgttcctcacgggcccgaaggtcgtgaagaccgtgacgggcgaggacgtgacgcaggagcagctgggcggcgccacgatgcacaccaccaaatcgggcgtggcgcagttcgccgtagataccgaggaggagggcatcgcgctgatccgcaagctcatttcctatatgccgcagaacaacatggaggacgctccgctggcggtctgcaccgacaagatcacccgtctggaggattcgctcaacgagatcgttcctgacagcgccaacaagccctacgacatgtcggaggtcatcaaggcgatcgtcgacaacggcgagtatctggagtcggctcccggctatgccaagaacgtcatcacctgcttcgcccgtttcaacggccagagcgtgggcatcgtcgccaaccagcccaagttcatggccggcgtgctcgatatcaatgccagccgcaaggctgcgcgcttcatccgcttctgcgacgcgttcaacattccgatcgtgaccctcgtggatgttccgggcttcctgccgggtacgacgcaggagtacggcggcgtcatcacccacggcgcgaaactgctcttcgcatactgcgaggctacggtgcccaaggttaccgttacgctgcgcaaggcttacggcggcgcctatatcgtgatgtcgtcgaagcatatccgcggtgacatcaactacgcatggccgacggccgagatcgccgtgatgggcgccagcggtgccgtcgaggtgctctacggcaaggaggtcgcagcgatcgaatcgcccgaagagaaagccaagttcgtggccgaaaaggagaaggagtacaacgacaagttctcgaacccctacaacgccgcccgctacggctatatcgacgatgtgatcgagccgcgcaacacgcgtttccgcatcatccgcgccctgcagtcgctctctaccaaacgcctgcagaacccggccaagaaacactctaacattccgttgtagtatgaagcgtgcgattttaacagcaggattgctcttcgcggctctggctgcttcggctaaaggcgccgatacgatcctcgacaaggaccccgtcggcatctacgttacgatcgtttcggtggtgacggtgctttcggcgctgatcgtcctctttctgctgatccagcttttcgccaaagtcatggtgaagagcgcgcagaagaaggccgccaagtcgaagacccgcggcatactggtcgacgacatgaaggtctcggtgcctgcgggctgcgacagcgtggtcaacggcgagatcatcgccgccatcgcgctggccgtgaagctcaacaaggccgagatgcacgaccgtgagagcgacgtgattactatcaacaaggtggcgcgcgtctactcgccgtggagctcgaaaatccacggtctgaccccgatgcccgaacgaatcagaaaataaatttagagagcgctccgcaagccgtccgaaatccgctttccgccgcgggcatgccggccccgccggggcgatcccgatcggtgcgaacgccggaaccgggactgcggtccggaaccggaagacggcgcggaattaaacaaacgaattttatgaaagaatacaatttcaagatcaacggtaacgactacaccgtcggcatcgagattctcaacgacaccgaggccgatgtgatcgtcaacggcgcctcctattcggtcgaggtgctcgacacgaccgtgaaacccagcgtggcggccaaacctcaggtggcggccgttcccgcttcgcatcccgtgcagccttcgaccgttccggttacgaagcctgccgcggcggctcctgcggctgcgggcgagtcgcccgtgaaaagcccgctgccgggcgtcatcctcgacatccggatcaaggagggcgacacggtggccgtcggccagacgctggtggtgctcgaagccatgaagatggagaacaatatcgacagcgaccgcgccggcgttgtcaagtcgatcaaagtcaaccgcggcgactccgtgctggagggcgacgtgctcataactctcggataggcgtatgttagacttcctttcatcgtcgttcctcggcgaaagcgtatccaagttcgtgcacgagacgggatttgcgcagctcttcctgcaggagggcggctacaagtacctcatcatgatcgccgtggggtgcttcttcctctatcttgccatcaaacacaagttcgagcctatgcttctggtgccgatcggcttcggtatcatcatcggcaatatcccgatggtgaccggccacggaatcggcatctatgaggaaggctcggtgctcaactacctctatttcggcgtccgttacggcgtctacccgccgctgatcttcctcggcgtgggcgccatgaccgacttctcgtcgctgatttcgaaccccaagctgatgcttatcggcgctgctgcgcagatcggtatcttcgcggcctacatgggcgctctggcgctcggattcccggccaatgaggccggttcgatcgccatcatcggcggcgccgacggtcctacggccatcttcctgacgagccgtctggctccggagtacatgggcgccatagctatctgcgcctattcgtacatggctctcgtaccggtcatccagccgcccgtgatgcgtctgctgacctcgtcgcgcgaacgccttatcaagatgcgtccgccgcgtgccgtctcctccaccgagaagattctcttcccgatcatcggtttcctgctgacgacgttcgtcgtgcctgacgcgattccgctgctgggtatgctcttcttgggcaaccttctgaaggagtcgggtgtggtgaagcgtctggccaccacggccagcaaccagctgatcgacatcatgacgatcctgatcggcatcacggtgggagcttcgacgcaggcgtcggtcttcctgactcccaagacgctgggtatcttcgtgctgggtgcatgctcgttcttcatcgccacgatgggcggcgtgctgttcgtcaagttgatgaacctcttcctgaaggagggcaacaagatcaacccgttgatcggcaatgctggcgtttcggccgttccggccgccgcgcgcgtgtcgcaggatatgggtatccgctacgaccgttcgaactacctgctgatgcacgccatgggtcccaatgtggccggtgtggtcgggtcggcagtcgccgcaggtattctgctctcgttcctcggataggggatttcgatattgacagggacggcttcggggccgtccggtgtaaagagggtttcgggttgccgaagccctcttttcgtgcgacaaggcggagtcggagttttcggtgtgcgggggccggagtttcggtgttcgtggccggagttttcggtgtgcgggccgggggtatgggacggagttcgcagatgccggggggggcggttgtggttgtggttgtggttgtggttgtggttgtggttgtgggggatgtgcgggcgacgggcttgcaatttctcctttgtatgttttcgctgtttttcgtatttttgcaaactgaaaaaacgtttttatgaaccgggtgaagtggatattgctgggggtatgtctcttcgggatgctgatcggggcggccgtggcgtattccggctatgtgaaaaagcggctggatgccgatggggcggagacccgtgcggtgctcaccgcgagtttttcgcggaccgaatgcgtcggataccggcccggataccggggacggatgcaccgcaatttccgtgaaaagcgcaccgtctattatttcagataccggttcagggtgggcgggaccgattataccggcaaggtccgcaaaacggaaaatctcatgacggcccgcatcggcgattcggtcgtcgtgcgttatctgccggacgatcccgacgtacatcgcttggtccgcagcgagggcggcaaatacagggtgatacggccccggccgcgcagccgcgcccgtcgttcggcatcctgattcctcctgtctccgtggccgtgcccgccgttcggcgtcctgacccgtcctgatccgtccccgtctccattgttgtgtctgccgtgcggcggcgtgacccgccctgtctccattgccgtgcccgccgctccggccttcggtgcgttcgcggcatgcttttttagctgttgctgggactttaattgccttaaaataagaatttttcggcgattgttcaagttttttgtttttcggatttatttgtttttgcagttcggaaactttttcgtacctttgcgcacccgctttcgtgcgggaaacggattacaataagttaaattaaacgtaaaacaaagtggattcattaagctacaagactatctcggccaatgcatcgacggtgaccaaggaatggatcgtcatcgacgctacgaacgaggtattgggacgtcttgcatcgcagatcgcgaagatcctccgaggcaagaacaagcccagctacacgccccacgtggattgcggtgactacgtcatcgtcatcaatgcggagaaggtgaagctcacgggcaacaagatgaccgagaaggtctacacgcgtcacaccggatatcccggcggccagcgtttcgctaccccggccgactatctggcaaagaaaccgacgttcatcgtcgaaaaagcagtcaagggcatgctgccccgcacccgtctgggcgccgccctgctcaaaaacctgaaggtatacgccggctcggagcatccgcacgccgcgcagaacccgaagaccattaaattaaacgagattaagtaagagttatggaagttgtaaacaccgtaggtcgtcgtaaggccgctgtggctcgcgtatacgtgaagccgggtaagggtcagattacaatcaaccgcaaagcgcttgaagtttacttcccgctcgaaattctccagtatcaggtgaagcagccgctgctggctaccaacaccgtggagaattacgacatcgccatcaacctcgatggcggaggtatcacgggacaggcttcggccgctcgcttgggcatcgcacgcgcattgtgcgaaatcgacgccgagatgcgtccggtactgaagaaggccggattcctcacgcgcgatccccgcgaggttgagcgtaagaagcccggtcagcccggagcacgccgcaagttccagttcagcaagcgttaatccgaacgacctattttcggcaggcacggcgagggttacaaaccggaacgactacctatatattatatatatcgcgtattaccttcaggttgccccgccgcggaaaatccgcgggaccggcaaggccgctacccgccggattgaagaaaagagaattaaaattattaaacacattgaattaaaatgtcacgtacagattttaatacattactggaagccggtgcgcacttcggtcacctgaagcgcaaatggaaccctaaaatggctccttacatcttcatggagaagaacggcatccacatcatcgacctgcacaagaccgtgctgaagatcgatgaggccgctgcagccatcaagcagatcgccaagagcggtcgccgcgtgctgttcgtagccaccaagaaacaagctaaggagatcgttgccgaaaaggtggcagccgtcggtatgccttacgttacggaacgttgggccggcggtatgctgacaaacttccccaccatacgtaaagccgtcaagaaaatgtcgaccatcgacaagatgaacagcgacggcacgttcgataatttttccaagcgcgagaaactccagatcgcacgccagcgcgcgaaacttgagaagaacctcggttccatcgccgacctgacgcgccttccggccgccctgttcgtcgttgacgtacagaaggagtcgaatgcggtaaaagaggccaagcgcctgagcatccccgtatttgcaatggtagacacttgttgtgatccgaccgacattgattacgttatccctgcaaatgacgatgccaccaaatcgattgccgtagtgctcgatgccatgtgcagcgctatcgccgaaggtaccgaagagcgcaagctcgaaaaggagaaggaggcgcaggaggctgaggccggtgccgacgctcccgtgaagaaggagggcaaaccccgcatcaagaaagccgtgaaggccgctatcgatgccgaggaggccgccgtagccgacgtcgtagccgctgtcgagactccgttcgaggagcctgctgaggttgcggccgaagaagctgccgttgttgccgaggaggccgctgcggttgcagccgaggaggttgccgaggccaaggccgagtaattcgggcctttgggaaaagaaattaatcacctaaaagaaaggaaaagtattatggaaatcaaagctgctgatgtaatgaagctccgcaagatgaccggtgccggtatgatggactgcaagaaagccctgatcgaagccgaaggtgactttgcacgcgctcaggacattatccgcgagaaaggtaagctcgtcgttgccaagcgtgccgaccgcaccgctaccgagggtgtcgtcgttacgaagatcgtaggtcagaaggcctatatcctctgcttggcgtgcgagaccgacttcgtggctcagaatgcagaatataccgcttcggccgaggcgatgctggaggttgccgtaaacagcgacgccgcagaccgcgacgccctgatggctgccaagaacgccgaaggccacaccgtcgaggagatggtgaccgagaaatcggggcagacgggtgagaagatcgagctggcatactatgcccgcatcgaggctccctactgcgctgcttacgtacacttcaacaagaagctcggtacgatcctcggcttcaacaaggaggttccggcagaggttgcccacaccgtcgccatgcaggccacggctatggctcccgtgtcgatctcggaggccgactgccccgcagaggttgtggagcatgagcgcaagatcgccgtcgaggcgatgaagcaggaccccaagaacgccaacaagcccgaagccatccttgagaagatcgccgaaggcaagatgcgcaagttcttcgaggagaacacgctgctggctcaggccgtagtgggcgagaaagagtcgatcgccgacttcatccacaaggcagacaaagaggcgacggttatcgcttacaagcgtttcgcactgggcgaataatccgaccgaaggacggcaagaagaccgttcgtatattgtgaaagaccggaactctccgatgagttccggtcttttcgtgtgtatggtcttgtgggagccttttataggatgtttcataggatgtttcataggaggccggcttctgtgcggagtatgcctgacgtatagtcggcagcggccggaaagaagccgaatggcgattgccgaagggtgtcggcttggcggtttcttgtgtccttatgccgaacgaacgtacggcgctttgcgcttgccggaaataacgctgtccggattttcccggagcgttttccggttgttctcgattgtctgttttgcccggctgtattatgtcgtcggctgtttttgcgtcgtctccggttgcgcccgatcttttcggccaatcggtcggaaacgaccgaaaggcgctttcccggttattcacgctctgttttcaagactttttcggatgccgcaaatcccggttctatctgatccccagccgccagagcgcccgcaggatgaagcgtctgacggcggcgggcagcgtcagccaacagcgggactgtcgtcgccaccggcgggaagcggtggagacgatgcggccggaagggcggatgacagccgtcataacggccgctatgtctgtcgctgcgcaatgttcggtcatccggtggttgccgtcgcctgcgagggtgaaacgaagccggggcggggcaggtgccgtttctgcgggtgtttggccgggattgctggtcgcttggggattttcggaattttcggggcgtgccggaagcggaggggtcgccttgccggtttcccggagcgcggggagcggagcgggagtatctccggcgttggaggccgttgccgacgcagctgttgtcgccgcttccgttgttgcggccgttggtattgccgacgcttccggtgtctttgttattgtctctaccgtcgtgtttgccgattgcgggggcatctccccgctctccggttcgatgcggagaatgcggtggaggatatggcgtccttcgcagcggaacagcaccacgtcgcccggttgcagggcctgacttccggagggaagacggtcggggtgggaatttgcggcggtgtcgggggcggtttcgtttcgcgcgagcctgttttgctttcgggcggctgctgccgtttcggaatttccggtgtatcgggcgatcggagtcagtactgcgatgtcgcgttcgctgcgcagcaggggccgcatgctgtggcccttcatgcggatctggacttcgtgtccttcggcgagcatcgcttcgacctgctcgaaaaacagacggttcgaaagctgcatcacgggcggggatttgcggattcgccgccgaaaatcgtgcggcaggccagttcggcggccgcggcgtcgggcaggcattcgaggtggtagaccgggacctgcgccaccacggccgagacggttgcgcatacggcgtcttccagcgtttcgtcgtgggcgaacgacggcgggcacgagggcagcagcgcgccgatggcctcgatcgcccgcaggcggcgaatccggttgtgcggagcctgtgacagccgtacgatggcccggatcggttggcatacgttgcggtagcagggcgttttcccgctccacggcgcaccgaagaccatggcctgcggttttggggcgccggttgtcgctgcgcttgcgtccggagtttcagccgcagctgcgggggcgttcgccggattttggacggctccgcaaatcgggtctgcatctgcggtctgcacgatgcggacgatcggactgtcgtcgttgagcagctccgcgccggggatatgttcacgccacagacgggtgtgggtgcttttgccggtgcccgattcgccgaggaacagcacggccctgccgttcaggctgatgaccgacgaatggatggctacggcctgccgcgccacggcggcgatgttgaacatcgaccataatccgaagcggaacagcgccgggttgtgccgcagtgtgacgtcggtcgtgacgagcggtgcgccgaacgccttgcggaaacgggcggcggcgcagccgtcgcgcggcgtcatggtgagcaggtaaccttccgagtcgcggccgaaacggcagtcggcgtcggcatcggcgaagtcgaattcgtcgagttcgcggtagccgtccgcttggcggatttcgccgcgggtttcgacgctcaggtcggccgggccttcgtctgcggcggcgaagggcgccagcgccgtgccgaaagaccctgcggtgaattcctgcgggacggcgatgcgtatgcctgctatgatgtattccataattattctcctattgtgatgattcgggtgcagtattcgagcgaactttcgcggtgggcgataaccaccagcgtcagccccttgtcgcgcgccgccagctcggcgaccgaacggttgatctcctcctcggtgcggctgtcgagcgccgaggtcgcctcgtcgaagaagagcacgtcggcccgacggtagagcgcgcgggcgatgccgatgcgctggcgctgtccgcccgaaaggcggcagccgcattcgccgacatgggtgtccatgcctttggaaagtcccgcgacgaactctccgagccgggcggcttccagcgcttcggctacgcggccgcggtcgatttcgtcgtcgggaacgcccagcgcgacgttggccgcgaagcttccgtcggcgatgaaaaggttttgcgagacgtagccgatgcggttttgccatgcgcggcggttggcggcggtgaggggcgtgccgtcgatcgttatttcgcccccggtcggttcgtaaagtcccagcagcaggttgaaaagcgtcgttttccctgcgcccgatgcgccgcggatgccgatgcgttcgcccttgcggatcgagagcgtaaggccgcggaaaagctcgtgcccgtcgtccgcgaagcggaagccgaggttgcggacggcgatttcatgttcgaaagacagtatttcggacgcgcatgctccggatgtgccgccggccgaaacggatttcgttgattttgcggtgcagggctgtttggccggggctgtttggccgtaaggagccgtttgtctgccggatgcggttcgtttgtccggagccgttcgcctgccgcgggcggtctcgccgctctccgccgcggagtattccgacggcgggatagcggcggcatcagtatgggggcctttcccggctctctcggcggctccggagagcgtgtccggcgatgcggaggaaggttcgtccccggccgttgcgtcgcgcaggacggcgatcgtgtagcggttgtacttgatcgaggtccagcccgccatgatgctgcgcaccgaaggcatcaggcgcagcgcggctacggcgaagacgccgaaaagcagctgtgcgcgtccttcttccgcgcccagactcagcgcgaccagcagggccatgcccagcgccagcccgatttcggtaaaggcctgcggaagcatgccgatcgccgtttcgcgcaggcgcgtgcgaatcacctgatccatcgcccggtcgaacgaacggagcatcatcgggaaggcgttgttgatctcgatgtcggcatagccgcggaaggtctcggccacgagccgcgccttttcgcgctgggccttgttttccagctcgccgtagcggttgatgcggttgcgcaccaagccgtaatagatccagatcgaaggcaggaagaccgcaacggtcagaaccgccgcaacgggcgcgtaccagagcagcgccccgaaaagcagcgccagcagcagcgcttcggcggcgatggcggcggcgggtttcagcacgccggccgtgaaggccagacagacgacattgacgttgcgggccagcacggccgagttcgacgacttgacgaacggcagtccccggtcgtggtaggtgacgtagagccgccgcgaaagggtgcggtagaggtcgtagatgtagttgcgctcgatgcgcgccagccagagatttgtcaggcatttgaggacgataacggccaccacggcggcgcagaccgtcagcgcgaaactgcgcggcgacgtgaagcccagcgccgtgtagatgcgggccagctgcccgccgccgtcgagactccgggcgtcgagcgccagcgccagcacgggcagcagcacggccagtccgaggaagttcagccctgcgcgcagcagcagcgtgcaggccatgccgaagcccctgcggcggaatttgtgcggtatgatgccgatgatttcgttcatgtcattcctccaccttttcgattcttcccagtttcacgtaccacaaatacccctcggtttcggtgtagcccatctgccgcagcagggcgaggtattcgcgcacctgacggcggtagcgttcgggttcgcggccgccgaacttgtagtccacgaccacggcccgcgtgccgcggatcatcacgcggtcgggacgccgcgcggaggagccgccgggaatgatgatttcgttttcgttgcgcacgcgctcccagtccccggcgaaccactcgcgggccgcggggtgttccagcgcgcgggcgatcatccgccgcagggcggcggcttcggcggcggaaagcgtgccgtcggcctgcatccgctccacggcgaggcgtatctgctcctcgtcgtcggcgttttcgaaggccttgtgcatcaggatgccgaaattgcggggcgagagttccacctcttcctcctgctcgaaataacgctgcgaggggagccgcaggcgcaggtcggcgcgcgccgtggggtagttttccagcacgacgtgctcggcgccggacgttttgccgccgtcggcgaccgggccgcggaactggccgaattcgaaccgctcgcccgtttcggtgacggtgtaacgcccttcggcactgcccgcgaggactttgtcgccgtcggtgaggatgctttggaggagcagtccgccgacggttttgccgcctttctgcgggatgaagacatgcagcgattcggcggcgcgcgtcagcgccacgtacagcagattgacgttgtcgacgtgcgagtagaccagttcccggtagtactccgccgagaatcccgattcggccatcgacttcttgtatttcaccggaaagcgtcccacggcttcggcgtcgccgtgcgcctcggcccagacgatgttggtcacgttgccgcccgacttggggtccagctgccacgagcagtaggggatcagcaccacgcgcttttcgagtcccttggccttgtgtatcgtggtgatctcgacggtcgtttcgctctcctcgacgctcagcgaacggttctgcccctgctgctcccaccagtcgaggaacagcgcgatgtcggcgatcttgctggaacagaagccgatgatctgttcgtggatcgcctgcaggtaggccgtctgctgtttgtcgtcctgcagaccgtgccgcatgacgatgcgttcgaacgcctcttcgggcgacagcaggcggatcgagcggaagaacgtccgttcgtcgtcggacagcgggcggtcgaagccgcggccgaggtagtggttgtagacggcgcggctcagcgagtcgtcggggttgagcgacagccgcagggacgcggcgatgaacgaactgacgggggcgttgcccacgatcagcgcctcctgcgtcatcacgtcgaaacggtagcggggatcggtgttgcagcgtttgaagtcgagcagctcggcggcgaccttggcgccgtcggtggccccgcgtaccagtatcatgatgtcgcgcggccggaatcccttgtccagcacctcgcagatgcgctccacgacgggcggctgctcggcgaaggtcgagaccgagacgtagcccggccggtcgctccggcggcggggagtctgcgcgtgtccgcgataggcgtcgcgcagggtgtcgtgcagtgcggccgccgccgcggggttgatgccgccctttgcggccgcttcgtcgagcgtctcgttcagcgcccggttgtcggtctcgaccacgcggccgatgatctcgttgttgaattccaccacggcgggcaggctgcggtaattctccctgagtatctccacctcggtgctggccgggtcgagctgcgcctgcgcctgcgagtggaggattttccagtcgccgccccgccagcggtagatcgactgcttgatgtcgcccacgatcagcaccgacgtcgcctcgctctgcgacatggcgttttgcagcaggggcaggaagttctcccactccttgacggaggtgtcctgaaattcgtcgatcatgaagtgttcgaagcggttgccgaccttctcgtagatgaacggcgcgtcgttgtggccgatgaattccgagaggatgtatttggtctccgagaggagcatcatgttctgctcgtcgcacaactgctgcaccttggcgtagaggtccgacagcagcgcgaagctgcggtagttctcgcgcagcaggtcgcaggtgttccacgagcggacgttggcgtcgtacagatcgcacatttcgcgcagcaggggttgcagccgggcggcgagcggcgcggcgggcgatcccttgggcgcccagccttcggtcgtcaggctcattttgccgaccgtggcggtgtagggtttcagctctccggccgcgaccgtgaggaaatagtgggcgaaactgcggctcttgcccgtgaagtccgccgggccgacgcccgcatcggccatgatccgtacggcctcggccgcacgctcccgcatctgctgcttggtcgccgcggcgcgcgccgtcgcttcgccgacgatgcggcccagctcctcgcgcgagcgggcgagggatagagcctccttgttcttctccttgaacagttcgccgccgagcgtcaggatgccgtcgcggacgtcccacttcttgccctcgtcgatgcgctcctgcacgaagtccgtgagccagcgctgcaggtcgcggtcggtggttatctgctcgatgagcgtgtcggcgctcttggtcagcaccgaggcggtctcgatctcgacgttgtaattgaggtcgatgcccagctccttgatgaaggcgcgcaggatgcgctggaaaaaggtgtcgatggtcagcaccgtgaagcgcgagtagtcgtgcaggattttcgaacgcacctccgcggcccgcctgcgcaccgtggcggcgtccatgtccagttcgcggcagaggttttcgaggtaggagctttcgccgcccgaagccagcaggtgtatctccttgaggatgcgcgacttcatctcctcggtggccttgttggtgaaggtcacggcgaggatgtggcggtagatggagggctgttcgaccacgtcgcgcacgtatttgtatgccaactggtaggtcttgcccgatccggcgctcgcgttcagaattttcgctctcactgtccgaaatgtcgttttaggtagtaaaagtacaaaacaaatcccgaacggcaaaccgaggtttgcaataatttcgtaaattagcgacgtattaaaaccgaaaagtatgaagaagatgattctgagcgcggtgatgctggtttttgccgcatcgggttatgcgcaggaaacgggcgctgcgggcgccggagagcgcaacgagtggctgcccaccttcgaggcggttgcggtcgatgccgatctggacgtcaaattcgtccgggttcccgacaccgaggccccgaaaatcgtatacgacaccaaaggctcttacaccaccaagttccgcgccgaggtcaaggacaagaccctgcgcatcagcgagaagcccgattcgcgccgtcccgaacgcaccgaggtgacggtctattacaacgcgctgcgggccgtttcgctgtcgggcgcggccgcgacgttcgaggggacgctcgacgccgcggtgctcgacgtgacggtcaaccgcaaggcttcgctgacggcgaagctggacgtcaaggacctcaagatggagcagacgggatacagcacggcgaacctttcgggttcggtgcgttacctgacgttgtatgtatcgacgggcaaggtggccgcatccgatctggaggtgatgtcggccgaggtcaatgcccagagcaaggccgaggtgtcgttgtggatcaccgaccgtttcgtgggcaagacgacgaccaatgcgcggatcagctacaagggcgatcctaagatcgtacgcggcggcgcgaagttcatgggcggcgaaatcaaccgcgtggagtagcggatgaagggttttcgcatatcggcccgccggagcgctcctgcggcggggcctgccggcttctccgggcggggtggaacgggtattcctgcggcggacggcggagctgtctggctttgccggtgtaaccggcgcacctgccgggatacggagacgattcggcgggggccggtggggatgccattgttttacgggactgaaaacactgtagggcggctatgaaaggatttctggaagaggtcgccggggacctgtatgcccgatacggcgagggactgtccgagagggccgtgctctttccgtcgcggcgtgcgcggctgtttttcgtcgatgccctgacgcgcatcgccgggcggcccatgtggcagcccgaatgggtgaccgtcgacgacctgatgagcgaaatatcgggcctgcatgcgggcgaccgcgtgcggctcatcaccgaactctataaggtctattcggaattccacaccgagccgttcgacaagttctatttctggggcgacatgctcctcacggacttcgacacgatcgacaagtaccggatcgacgcgcagatgctcttccgcaacatctccgaaatcaaggagatcgaagccgacatctcctacctgacgcccgcccagctgcagattctgtcgttctggtcttcgctgggcgaggaggccgatctttcggaggagaaacgccgctttctggcgatctggaagacgctcggccccgtttaccgcaaattccgccggcggctcgtgtcgctcggcatcgcctacaacggcatggtccagcgggccgccgccgaccgcatcgccgaaggcgcgttcgcctttcccgaaccgcggaggtatgtagtggcgggattcaacgccctgtcggagtgcgaaaagcagctcttcaaattccttgctgttgccgccgaaaccgatttctactgggattacgacgcttattataaggacaaccccgaacaggaggccgggatgttcgtgcgctcgaacgtcgcgctgtttccgccccggaccgaattcgcgcacgacaacatgcggggcgaaaaggaggtcgtctccgtggccgccgtgtcgaacgccgtgcagtgcaaatacgccgcggcgattctcgcggacctcgcacgccgccgcgcgcaggaggaccccgaagtcgccgccgggctgaagcccgccttgggcaaggagaccgccgtggtgctgaccgacgaaaacctgctgctgccgctgctgtacgccctgcccgccgatataggccgtgtgaacgtcacgatgggttttcccctgcggcagagccttgcctacaccttcgtcgaacgccttgtggagctgcagaaccaccgccgcaaaaagggcggcggctggaccttctaccatgccgacgtggcgggtattctggcgcatccctatgtcgccgagtgcgacgccgcgctgacccgcacgatgcacgaggagatcgtccgcgaccggcggatttcggtcgatgccgcatggctgggccgcaacgaactgctgaaacggatcttttcgcccgcggcggagtggcgcgagctgtccgattacctgctgggcgtgatcgccgccgtggcgcgccagccctacgagggcgacgacgccagacagcgggtcgaatttctggccgtcatcgccgagcaggtgaccaaactgcgcaactcgctcgacgaatgcgacatcgagcttgcgaccgaggtgtatacctcgctgctgcgccgccatttgcagacgctgcgcatccccttcgagggcgaaccgctggaggggattcagatcatgggtattctggagacccgcaatgtcgatttcgagaacgtcatccttctctcgatgaacgacgacaattttccgggcaaccacgtcgcgcagtcgtcgttcattccctacaacctgcgtgcggcctacgaactgcccacgccggaacaccacgaaggggtctatgcctactatttctaccgcctgatccagcgcgcgaagagcgtgcatatgctctactgttcgcatgccgacgacaaatcgacgggcgagccgagccgctatatctaccagctggattacgagagcggcttcgacgtgcgcaagatcgaggtgggggtggacgtgaacctcgccgagacggctccgatcgaggtggcgaaggacggggaggtgatgcggcggctggaacgcttcgtcgatgccgaaagtcccgccgcgctttcgccgacggcgtttttccgctacgtggcctgcccgctgcgcttctatttccactccgtggcccggctcgaagccgacgacgagatttcggaggaggtcgatgcgccgatgttcggcacgatccttcacgccgccgtgcagacgctctacgcccggatcgtgggcgaggagcatcccggccagaccctgcgggcgatgatccgttcgggcgaggtcgccgcggcggtcgagcgggcgatcaacgaaaattatttgcaggacgaacgcgcttcggccgaagattatacgggcaacctgctgctggtgaaggatatcgtcacgcgctacctgcgtggcggggtgatgccttacgatgcggcgcacgatgcgttcgccgtgtcgggactggaggagcgggtggcttattccttcccgttccgcgccggggagcgcgagctggagatgaagttcgggggcatcgccgaccgtatcgacatgctcggcgacggcgcgctgcgggtcgtggactacaagaccggggcgccgcatctggagttcgacggcgtggagagccttttcaccggaaccggcaaacagcggctgtccaatatcctgcagacgctgctctattcgatgatcctgcaccatacgcggggctgcgacgccgaacccgcgctctactacgtccgcagcatgaaccgccccgactattcgccgcagctggacgacaagcagctgggcgtcaggggggcgcgctatacgctttaccgcgaacgtttcgaggagctgctgcgcgcgcagctggccgaaatgtacgaccctgcggtgccgttccgccagtgcgaggacgccgatacgtgcaagttctgcgatttccggataatctgcaaacggggctgagacggttcagagtttcaccctgaaatacgacgctccgctgcggcgggccgcttcgagaccgatctcggaatcctcgaaaatcagggtttcgcgcggcgtgcagccctcgcggcgcatggcttccagaaaacagtccggggcgggtttgctgcgcgcgacgtcggcgcccgaaagaatcccgtccaccgcgttttcctccggcagtctctctcctttgcgtgacgtgtcttcgtccggcgtttcgagacgccggacggcttgcggtccggcgattcccagatgccgcatggcgttgtcgatattggcgcggctgcccgtcgagacgatccacacgcggccgccctgcgcacggaactgccggcagaaatcccataacggcctattgagccgcacggtgtcgaaaaacgtggggtagagcgcgatcttgcgcagccgcagccgttcgcgttcggccgggtcggcgatgccgatccgggtcaggaaatcgtcgcaccgcatgccgaaatagcgggccgcatactcctcttcggtgagcgtataacccgcttcgcgcagcgtggcgacataggcgagcgtgttggcacgccgggtgtcggccagcgtgccgtcgaaatccagaaggatcagttttatttcggagccggggtgtgtcatgtcgtggcggaaaatagggaacgccgcagaaggcgcggttttttgagtttcggtgcaggctgtcaatcgaacgactgcatgcccgactgggcgatgcgcatcagacgctggtattcggtgggcgaaagctccatgaagaagtagtggatcgggtccacgcgcatgccgttgtagcggacttcgtaatggaggtggggcgccagcgaaaggcccgtgtcgcccgaaagggcgatgatgtcgccgcggcgcacctgctggcccttgcggacgttgatcttcgagaggtggttgtacgaagtctcgtagccgttgccgtggtcgatgacgacggtctgtcccgacgtcgagttgcgctgggccacctcgcgcaccgttccgtcggccgtggcgaagacgcgcgacccttcgggaatggtgtagtccacgccctgatgcgattgcagcgtcttgtagaaggggtggatgcgcatgccgtacgaagccgtgagcagcgtcagctgcttgttgatcacgggctggatcgacgggatgttgtcgcaccggctgccggccgagtcgatgcgcgcctgcaggtcgaggtaggtgtcgttcagctcgtcgagccgcgtctccatttcggccacgcgttcgcgcagctcgcgtttgagacggcgcgacgaacggttgaagatgttttcgtaggtggcggcctgcttgcgctcgtactccgagtcgaagtcgtaggggtccgactcgaagaggatgcggaagacgttgcggtcgcgttccgagaggttgcgcatcaccgtcgtcagcgtgtcgtatcgctggacgagggccgtgtattcgcggcgcaggcggtcggtcgagtgcttgagctcgtactcgacgggcgtgtcgaagaacaccgagaaaccgatgtagtagagcacggcgacgcccgcccatacgaagaaatggatcgtggcgcgtatgatgttctgtttgcggcgcttacgcttgcgaagccgtatcaggtccttttttccggccatacgttacatttcgaaattggtttcacgcatccgcgccatcaggtcgtcgtattcggcggcggtcatgtcgcggttgaaatagttgaccggattcacgggcgtacccttgtgaatcacttcgtagtggagatgggggcctgtcgagcggcccgtgttgcccgtttcggcgatcacctgaccgcgggtcacgcgttcgcccggtttgaccagcaccttgctcaggtgggcgtagcgggtcttgtagccgaaaccgtggtttacgagcacctgatagccgtagccgccgttgtagccgctgccgacggccagttccacctcgccgtcgccggtggcgtataccggcgtaccccggtcgcagccgaaatcgacgcccgtgtgggcctgcacgcggtggagtacggggtggtagcggcgcggcgagaatgcgccgatgtggttgttgtgcagcgccgaacggtcgatgggccagatggccggaaccgccgccgacatcttctccttgtcctgcgagaaggcctgcagttcgtcgaacgacaccgattcgaggtagagcgtgcgggccagcgcgtcgagctgccgccacgtgccgaccatcagcggggcgtagtcgtcgtcgagcagcgcggcgtatttggtgtcggggtagggctgccagacgccttcgatcgacatcgtgtcggtcgagaagagcgaacggtagacgtagttgtcgcggtggcgtatttcgtccacgtggcgctgcgccgtgcggatgcggtcctgcaggatgcggtatttgatcaccagatcgcggttctcgcggatgatgcggtacatcttcggggtgtagaagaagtaggagaagagtacgttggcgatcgagacgagaatgaagccgatgagtatcttgcggatcagacggtaggtgcgcaggcggaacggggcggtgaccacgtcgcgcgtcagtgtctgcgcctcgtgcgtcagcgtgtgtgtatccgatctttgccctttttgccccatcgtggaaaaaactcctgttaataggatgcaaatttaactttaattgtgtaattttgcaacccgaaatcacaaacgaaagaatcggataaaatcttatatatggaatcgaataaaattcgccgcgcctttctcgacttcttcgagagcaagggccatgtgatcgtgccttcggcgccgatggtcgtgaagggcgaccccacgctgatgttcaccaatgcgggcatgaaccagttcaaggacatctttctgggcaacgcgccccgcaaatatccgcgtgcggccgatacccagaagtgcctgcgcgtgtcgggcaagcacaacgacctcgaagaggtgggccacgacacctatcaccacacgatgttcgagatgctgggcaactggtcttacggcgactacttcaagaaggaggcgatcgagtgggcgtgggagctgctgggcggcgtctacaaactgccggccgaccgcatgtacgccacggttttcgaaggctcggaggaggacggcgtgcccttcgatcaggaggcttacgactactggaagcaattcctgcccgaagaccacatcatccgcggcaacaagcacgacaacttctgggagatgggcgagacgggtccctgcggtccctgctcggagattcatttcgacctgcgcgacgaggcggagatcgccgccaagccgggccgcgagatggtcaatgcgggccatccgcaggtgatcgagatctggaacctcgtcttcatgcagttcaaccgcaaggccaacggctcgctggagccgctgccggcccgcaacgtcgatacgggcatgggcttcgagcgtctgtgcatgattctgcagggcaagaagtccaattacgacaccgatgtcttccagcctacgatccagcgtatttcgcagctgtcgggcaaggtttacggcgccgacgccaagtgcgacgtggcgatgcgcgtcatcgccgaccacctgcgcgccatcgccttttcgatcgccgacggccagctgccgtcgaacgtcaaggccggttacgtcatccgccgcatcctgcgccgcgccgtgcgttacggctatacctacctcggctttacggagccgacgatctgcaagctcgttcccggactggtggagcagatgggggagcagttccccgaactgaaggcccagcagtcgctgatcgaaaaggtgatcgaggaggaggaggcttcgttcctgcgtacgctggccacgggcatcaacctgctggacggcgtgatcgaaaagaccaagggcgagggccgggagctgatttcgggcaaggacgccttcgaactctacgatacgttcggcttcccgatcgacctgacggagctgatcgcccgcgagcagggcgtcggcgtggacctcgcggccttcgaaaccgaactgcaggcccagaaggagcgttcgcgcaacgctgcggccgtcgataccgacgactgggtggagctgttccccatcagggagagcctcttcacggggtacgatacgctgaccgagcaggtccggatcgcccgctaccgccgcgtgacctccaaaggcaagacctcttaccagctggtcttcgaccgcacgccgttctacggcaattcgggcggtcagatcggcgacatcggctatatcgagaacgccgacgagcgcatcgcggtcgtggccaccgagaaggaaaacggactgattatccatatcgtcagggagctgcccgaaaatcccgcggccgggttcacggccgtcgtggacgccgcgaagcgtcagtccgcggccaacaaccatacggccacgcacctcatgcacgaggcgctgcgcaaggtcctcggacagcatgtcgagcagaaaggttcgatggtgacgcccgaaatcctgcgtttcgacttctctcatttccagaaaatgaccccgcaggagctgcgcgaggtcgagatgcttgtaaaccgcgccgtgcgggccaactatccgctcgaagagaaccgcgaagccaccaaggaggaggctgagaaatgcggtgcgatgatgctcttcggcgagaagtacggcgacaaggtgcgcatggtccgcttcggctcgtcggtcgagttgtgcggcggtacgcataccagcgccacgggcaacatcggcttcttcaagatcctgaacgaaagcgccatttcggccggcgtgcgccgtatcgaggccgtgacgggcgagcgcgccgagcagatcatctatgccgccgaggatacgatgcgcgacatcagcgactatctgcataacccgcaggtgctgcaggccgtcaagaagatgttcgaaagcaacgaagcgctgtcgaaggaggtcgagaccatgcgccgcgagcaggttgcgcagtgggccgataagatcatcgcctcgacgcccgaacgccgcggcgtgcagctgatcgccacgcagaccgaccgtacgcccgaattcgtcaaggatctggcctattgtctgcgtgcgcgtgctccgaaactggtgctcgtgcagggttcggtcaacgacggcaagccgatgctgacggtgatgctcggcgaagagatcacggcgcagggcgtaaatgccggagccgtggtgcgcgaagctgcgaaactgatgcagggcggcggcggcggtcaggcgttcttcgccacggccggcggcaagaaccccgacgggttgcaggcggccatcgacaaggccgtggagctgataatggcgcagctgcattaggccgtccgattccggcggcgaaccgccttttggcaagttgccggctgatgaatttgcggcggggcggttgtgattttccggcgataatttccggcggcgaattcccggtcgcaatgtctggcggcggttccgacacggttcccgatcgcgctgcggcggaaatttgccgggtggggaatcggcggtgcgcaggccaaacggtgcgacggcatgggccggagcgaaacagatgagataattactaaaaacaaacgattatgaataacaaggtattattgatgatcctcgacggctggggcaacggccatcacgacaaggccgatgtgatttcgaccgtgcatcccgaatatatctcggccatgacggagaaatatccccacgcccagctgcgcaccgacggcgagaacgtcggcctgcccgaaggacagatgggcaactcggaggtcggacacctcaatatcggcgccggccgcgtggtttatcaggatctcgtgaagatcaaccgcgcctgccgcgacaactcgatcatggagaatcctgaggtgaaggcagcgttcgaatacgccaaaaagaacggtgtgaacatgcacttcatggggctggtgtcggacggcggcgtacactcgtcgctggagcacctcttcaagttgtgcgacatttcggcggcctacggcctcgacaatacctacgtgcattgctttatggacggccgcgacaccgacccgcgcagcggcaagggtttcgtcgccgacctcgaaaagcacctcgccgccacgacgggcaggatcgctacggtgatcggccgttattacgccatggaccgcgacaagcgctgggagcgtgtgaagatcgcatacgacgcgctggtcaacggcatcggcgaacgttcgtcggacatggtcgaagccgtccagaagtcctatgacgagggcgtgacggacgagttcatcaagcctttcgtgcgcatcgacgagaacggacagcccgtcggcatgatccgcccgaacgacgtggtgatctttttcaactaccgcaacgaccgcgccaaggagctgaccgtcgtgctgacgcaggaggacatgccggccgaagggatgcacaccatgccgctctactactgctgcatgacgccctatgacgccaagttcacgggcctgcacatcctcttcgacaaggagaacgtacccaacaccatcggcgagtacgtctcgaagctgggcctgcggcagctgcgcatcgccgagaccgagaaatacgcccacgtcacgttcttcctgaacggcggccgcgaagcggagttcgaaggcgaagagcgtatcctcgtggcgtcgcccaaggtcgccacgtacgacctccagcccgaaatgagcgctccggaagtggctgacaagctggccgccgcgctcggtgagcggaagttcgacttcatctgcctgaacttcgccaacggcgacatggtgggccatacgggcgtttacgaggccatcgtcaaagcggtgaaggccgtagacggatgcgtcgccaaggtcgtcgaagcggccaaggccaacggttacgaggtcgtgatgatcgccgaccacggcaatgccgacaacgccgtcaatgccgacggtacgcccaatacggcgcactcgctcaatccggtgcccatcgtggtcgtttcggaccgcgtgaagtcggtgcacgacggcatcttggccgacgtggctcccacggtgctccgcctgatgggcctcgaacagcctgccgaaatgaccggcaaggcgctcgtggagctgaaatagcccgcttgctgacacaaaaaatcccgcaccgtaaagtgcgggatttttgtttcggggcggaatccggttccgggtgcggaacggtttccggccggatgcttcgcgctgctcttagtcgagctcctccttgaacttctcgatccggccgggtaggagacgcagggcgtgcgccatctggtattcggtattcgtccggttgtttgtgatgaattccatggcgaccttgaagcagttgtcctctccgtctcgctccgccgaacacttgcaaacgaatttgtcccggttctgatcgttggaaatcgccagcagtttgtcataagggacgtcggcagtgaaattcgccgatacctccacgtaggcgtaatccatgtccgccacttcttttatgatggcgtagtagttgattccctgtactttgaacagaatgtccctgtcttcgtcgaacgtcgggacatagccttcgcgcttcagaaaagcgaagatatcctcccggacgctctgctgggcgaagagcgcggaaaccgtgccgaaaatcaggagcagggtgagcgtaaatttcttcatgccgattcttttttttgggttttgcaatagtcaaagataatgaattcctgcgcatggtggagcggaaccggacgaaatttgtgcgggtgtgggttcctccgaacaacgtctgctgtttcggcaatcgtaccgctttctgcagaagcttcgcgccgcggacctccggggctgccttgggtgatggcgcggaccggaagtttttcgtctgcggcgatcgctgctgcgcatgacggagtcagtagagttcgatgaattcgtacgtattgcctacggcggcgaggtagcgcaggaactcgctgcgggagacgaccaccgtggcgcggttgtcgttggggtggaacgaataggccgggaatctctccagattccggtccagaaacaggtgtacgtggcgctccgggtcgttgatcagcccgaagggcgacaccgagccgggacgcagtccgagccagcgctccatgcgctgttccgacgcgaacgagagcttgccctgccgcaggcggcgttcgaggtcgtggatggcgaggttctgctcgcagtcgaacgccacgaggtagtggcggttgcccttgtggttgcggaaaaaaaggttcttgcagtgcttcgagccgtcgtcgcgccagtatcggcgtgcgatttcgatggtcggggcttcggggtgttcgtaccacgtgtaggcgatgccgtggctgtcgagccagtcgaagactttttggcgtcggtcggtcgtggggaccgtggctgttgaagtgcctgcttccgcagttgttgtcggtcctgacgttgtccccgatgtgctcgcggtcttgccggattctcgcgcaattgtatacgtttctgccgattctctcgtctccgccgcatccgattccgttctcctctgtgctgttgttattgtggccggctccgttgccggtttctgtgccggtgttgccgcatccgattccgcggcggttccggggagagccgttttcgtcttttccgtcgtcatggcatcagtcgttgccataaaatgttttgatattctcctcgacgcatcctaccagcacgtccacggcttcgcggggcgaccatgcgttgtggggcgagagcagcaggcggtcgggttcgcggatgccgagcagcggactgtcggcggcgaagggttcgcgcgagaagacgtcgagggccgcgccggcgatcgaaccccggtcgagcgcttcggccagcgccgcttcatcgacgatgccgccgcgggcgacgtttatgaggagggccgagcgtttcatgaccgacaattccggcgcgccgatcagtccgcgggtgcggtcgttcagcggggcgtggatcgagacgatgtcggaacggcccagcagttcggtgagcggaagcgcggggtaaggctcttcgcgcacgacgcccgacgtcgaggtgtagcatacttcgcagccgaatgccgccgccagccgcgccacctcgcggccgatggcgccgagtccgacgatgccccatttcgagccgtagagctggtgggtgggcagtgcgaaatggaactgctgtccggcggcggagtaggcgccgctcttgacgtaacggtcgtaatagacgatgttgcgacgcagtgcgatggccgctccgagggtggtttcggccacggagtgcgtcgagtagcctgcggcgttctttacctcgatccccagctcggccgcggcttcgaggtcgatgttgttggtgccggtggcggctacgcagatcagccgcagccggggcagggactgaagcgtttcgtggcgcaggaccaccttgttggtgattatcacgtcggcttcgcggcagcggtcgggaagctcttccggcgtcgtgcgggcgtaacccttgtattcgcccaaggcttggagccggccgaggtcggcgcctccgagtgtgtactcgtccagaaatacgatgttcggtttcataaggatatgcggttttagttcatttctccgatcaggcctcggattacgaccgacgcgcagccgatgccgaacagcgcggggatgtaggatatggtgccgacgttcgacttcttgttctgctcctcgcagaggatcagcgccccttcgcgcatcggttcgggcgagtagacggccctgaaaccgctgcggacgccgattttgtggagccgcttgcgcagcatgtgggccagcggacagtggtgggtcttggagatgtcggcgatctccatcttcgtcgggtcggtcttggcccctgcgcccatcgagctgaccagcggcagcgaacggtccaaagcaccctttatcagcgccagtttgggcgagagggtgtcgatggcgtccactgcgtagtcgtatttcgcggcgtcgagcagcaggtcggtctcctcgtccttgatatagcggctgaccaccgtgagttctatctccgggttgatgtcgcgcaggcgttcggccagaatctcggctttctggcggccgacggtcgagtggagggcgaccagctggcggttgatgttgctcggcgccacggcgtcggcatcggcgatggtcatgcggcccacgccggcccggacgatcatctcggcggcataggcgcccacgccgcccagcccgacgaccagtacgtgggcctttcggagcaggtcgagtttctctttgccgagcagcaactcggtgcgttcaagccaattatccgtattcattttcaattgctgtgttcgttttatcgggccgggagcggcggcgttccggccgccttgtcctgcccttgcggcccggtcgtaaatatccgtccgtagttttccagcgtcgcccgttgcagttcctccggcgtgacgccttttactttcgcggcgcgcgcgtagatttcctcgatcgggacgtcgctgtcgtcggtttcgagaaaaagctgcgagaggggcgtttcgcgcagggattccagcgttttgggcgatgcgaaggcacgcaggccgaacgagaggtaataaccttttccgacggcccggcgggcctgttcgggcgatccgatgaagccgtggaagatcgctgcgcggggccggcaggcgtccagttcgcgcatgaccggctcgaaagccctgacgcagtgcagaaccacgggcagccgccgttcgcgcgccagcgcgagctgcgccctgaacgccgccaactgtgtttcacggtcggcgccatgcacgaaatcgagtcccgtttcgccgacggcctgcacgtcgccgagcaacggcacgatcgtgctaacgtcttctttgtcagcattccacggatgaattccggctgtccgcagttcgatgccgcggccggtcgggcggtgggtgtgtatgttgacgaatcgatcggtcatcgcgacaaatgtacgaattttaagtaaattaaaaaataatagatattgcataccggattctcggaaaaaattcgtattttcgcacgcgaattatggctgttagcacactaacaacgcacgacgaacccaaaatatatccaaacataacaatcaaaatctttaaccatgtcgaaaatcattacactacgcaagggtctcgacatcaatctccggggaaaggctcaggagtctctggccgacgcgccgctggcttcggagtatgccctctcgcctctcgatttcgagggcgtgactcccaagttgctggttaaggtgggcgatgaggtgaaagccggtacgccgctgttcttcaacaagtacagcgagcgcatcctcttcacgtcgcccgtcagcggtacggttgcggccgtcaaccgcggcgagaagcgcaagattctctccgtgaccgtgacgccggcctccgtacagagctacgaggagttcgcgaagcccgatctgcagaaggcttcccgcgaggagattgtcgagctgctgctcaagtcgggtctctggcccatgatcgtgcagcgaccctacggcgttatcgccgacccgaacgacacgccgaaagcggtcttcatctccgccttcgattccgcgccgctggctccggactacaactacgtcctgcgcgccgagcagaagaacctccagaccggtatcgacgtaatgcgcaaactcacttcgggcaaggtgcatctttcggtgcgcgccaaggccgaggggcagatgactgcgctcaagggcgccgagacgcatgccttcgcgggcaagcaccccgtcggcaacgtcggcgtgcagatccaccacatcgaccccgtgaacaagggcgaagtcgtgtggacggtcaacattcaggatctggcgatcatcggccgtctgttcaacgagggccgcgtcgatatgacgaagatcatcgccgtggccggctcggagatcgaaaagccgcagtactgccgcatcatcgcgggcgccaaggtcgattcgatcctcaagggcaacgtgaagcctcagaaggagggcgaccatgtgcgcatcatttcgggcaacgtgctcacgggtacgaaaaccgtggccgacggcttcatcggtttctatgccaaccagctgacggtgattcccgaaggcgacaagttcgagctgctgggctgggcgatgccccgtttcaacaaattctccgtatcgcgcgcctacttctcgtggctctgccccaagaaggagtacaatctcgataccaacatgaacggcggcgagcgtccgttcgtggtgacgggcctttacgagcggtatctgccgatggacatttacccgatgtacctgctcaaggcgtgtctcgccggcgacatcgacaagatggaaaacctcggcatctacgaagtggtcgaagaggatttcgcgctttgcgagttcgtcgatccctcgaagatcgagattcagcagatcatccgcgacggtattaacttaatgattaaggaggcttaacgatgagcgcattacgcaatttagtagacaagctcaagcccacgttcaccaagggtggcaagctgggcttcttggaatcgacgttcgatgcgttcgaaacgttcctgttcgtacccgacacgacgacttccaaaggcgcgcatatccgcgactgcaacgacatgaagcgtacgatgatcatggtggtagtcgccctgatgccggcgcttctgttcggtttctataacacgggttacatgcacttcctctcgcagggcgtgcagcccgaattctgggcttcgctctggttcggattcctcaaggtgctccccctgatcgtcgtttcgtacgtcgtgggtctgggcatcgagttcgcattcgcccagttccgcggccacgaggtcaacgagggcttcttggtgtcgggtctgctgatcccgatgatcatgccggtggacattccgctctggatggtggctctctcgaccgccttcgccgtcgtcttcggcaaggaggtgttcggcggtacgggcatgaacgtcttcaatcccgcgctgctggcgcgcgccttcgccttcttcgcctatacgccctcgatgtcgggcgcgacggtgtggatcgcgggcatgacctccggcgagggcgtggtggacggcttctccggcgcaacggcgctcgaaaacctgagcaccacgggccagatgggctattcggccatggacgccttcctcggtttcattccgggctgcgtgggcgagacttcgacgctggcgatcctgatcggcgcggcgatcctgctctttacgggcgtcgcttcgtggcgcacgatggtctcggtattcgtcggcggtctggcgatgggctatctcttccaagcgctcggcgtgacgacctatccggcatggtggcacctgatcgtcggcggtttcgctttcggtgcggtcttcatggccaccgatcccgtcacctcggcgcagaccgacaagggcaaatacatcgtgggtctgatgaccggtgcgctggccgtgctgatccgcgtggtcaatccggcctatcccgaaggcatgatgctgtcgatcctcttcatgaatgcgctggctccgctggtggactactatgtggtcgaggcgaacatctcgcgcagaaagaaacgtgttaaactggcaaaataggggagaatatggcaacgaaaaaattcaaatgcaccgtttgcggctacattcacgaaggagacgccgcacccgaaaaatgcccggtctgcatggcccccgcctcggcgttcgtcgaactgaaggacgagaagaaaaaggggctgttcagcgacaagaacggcaacgcatatattataatgtactcgacggtgatggtggtcatcgtagcgacgctgctggccgtggccgcactttcgctccagtcgcgccagtacgccaacgagctgaacgagaagaagcagtcgatcctttcgtcgctctcggcgcagggtgagaattacgacgccttcatcaagggctacgtgctcgacgccgacggcaacgagctcgaaggcgaggatgtcttcgagctgctgaaggaccttcagggcgctttcgacgacggcaagttccccgtattcgaagccgccgacggccgcgtggtgattcccgtgaccggcatgggcctctggggacccgtctggggttatatcgccctcgaaaaggatatggacaccgtggccggtatcatcatggcccacaagggcgagacccccggtctgggtgccgagatcgcaacgccgaaatatcaggcgcagttcgtcggcaagaagatcttcaaaggcgacgagttcgtctccgtgaaactgcgcaagggcggcgctcaggaccccgaacatgaggtcgatgccatttccggcggtacgaagacctcggacggcgtgacggcgatgctctacaacagcatggaacactacctgccgctgctcgaagccaagcgcaaggccgcggtcgagcaggtcgtatttgctcccgtgcgggatgagtctaacgaagaaaatgtagaaaacaatgagtaagaacgaaaaagagcctttgttttcggctaagaacatgaagttcctgacggggccgttctccgcgaacaacccggtcatcgtgcagattctgggtatctgctcggcgctggccgtcaccgtacagctcaaacccgccatcgtcatggccttgtccgtgacggtcgtgacgggattctcgaatctggtgatgtcgctgctgcgcaacggcgtgccctcgcgcatccgcatcatcgtacagctggtggttatcgccgcgctggtaattctggtcgatcaggtgcttaaagcctacgttttcgaggtttccaagcagctgtcggtttacgtgggccttatcatcaccaactgtatcgtcatgggccgcatcgaggccttcgcgctggccaacaagccgtgggcgtcactgctcgacggtatcggcaacggtctgggctacggcctgattctggtgatcgtggctttcttccgcgagcttttcggttcgggttcgctgctgggcttccgcatcgttcctgagagctggtatatcgccgagggcggtttctactccaactgcggcctgatgctcttcccgccgatggcgctgatcatcgtgggctgcatcatctgggtgcaccgttcgcgcaacaaggatttacaggaaaaataggagaatagcgtatggaatcattgaatatctttatccggtcgatctttatcgacaatatggtcttcgcgttcttcttcggcatgtgttcctacatcgccgtttcgaagagcgtcaaaaccgccctcggcctcggcgccgccgttacgttcgtaatggtgatgaccgtgccgctgaactacttcctgtatgaatacgtactcaaggcgggcgccctcgcgtgggccgggcttccggacgtcaatctggacttcctgaccttcatcgtcttcatcgccaccatcgcggctttcgtgcagctggtggagatggccgtcgagaagttctcgccgacgctttacagccagctgggcatcttcctgccgctgatcgccgtgaactgcgccatcatgggcggctcgctcttcatgcagcagaaagtcgatgcgctggagcttacgtcgctctggcagtcgatcgtctacggtctgggctccggtctgggctggtggctggctatcgtgatgatggccgcgatccgcgagaagacgacttactcgcagattcctgcggcgctcaaggggccgggtatcgcctttatcatcaccggcctgatgggtatcgccttcatgatcttctccggtattcagttctaaccttaaaagagattcggaaaacatggaattgactattatagttgcaatcattgcctttctggctgtaaccctcctcttggtggggctgcttctcttcgcaaaggctaaactgacctcgtcgggcgaagtgacgatcgacatcaacgacggcgagaaggtcatcaccgccgagagcggctcgacgctgctttcgacgctggccaacaacaaggtgttcctgccttcggcctgcggcggcggcggttcgtgcggcatgtgcaaatgtcaggtgctcgaaggcggcggcgatattctgccgaccgaaaccggattcatttcgcgcaagctggccaaggaccactggcgtctgggctgtcaggtcaaggtgaaggaaaacctcaggatcaaggtgcccgaagccgtgctcggtgtcaagaagtgggagtgtacggtcgtctccaaccgcaacatttcgaccttcctcaaggagttcgtcgtgaagctgcccgaaggcgagaacctcaagttccgcagcggcggttacattcagatcgacatcccgaagtacgacgccatcaagttctcggacatggacgtcgatgagaagtaccgcgccgactgggacaagttcaagatgtgggatctggttacgaccaaccccgaagacacgttccgcgcctactcgatggccaaccacccggccgagggcaatatcatcatgctcaacatccgtatcgccactccgccgttcgacaaggcgacgggcggcttcatgaaggtcaatccgggtatctgctcgtcgtatgtcttctcgcgcaagccgggcgacaagatcacgatttcgggtccttacggcgagttcttcctgccggacgacctgcccgatacgcaggagctgatcttcatcggcggcggcgccggcatggcgcccatgcgcagccacctgatgcacctgttcaagaccgagaagaccaagcgtcccgtttcgttctggtacggcgcgcgtgcgctgaaggaggttccctatctcgacgagttccacgccatcgagaaggattttcccaacttctcgttcaatctggcgctcgaccgtcccgatcccgaagcggacgccgcaggcgtgaagtacacgccgggcttcgtccacaacgtgctgtacgagaattacctgaagaaccatcaggcgcctgaggactgcatctacctcatgtgcggacctccgatgatgatcgcttcggtggtgaagatgctcgacagtctcggcgtgccgcccgaaaatatcctctacgacaacttcggttcgtaatccgatttgtcggtattcgaatccccggacagctgtccggggatttttttgtgctacggaacggtccctttgcggggacgccgtttcgggaattttcgtatatttgtagtaataaccgatttaccaacttaaaaccaaattctattgaaatgaacattccttccattttctggttcattcccgctgccgcggttatcgccctgttgctggcttgggcgttttaccgtgcgatgaagcgcgaggatgaaggcacgccgcgcatgcgcgagatcgccgggcacgtgcgccggggcgccatggcctacctgcgccagcagtacaaggtcgtcgccatcgtattcgtggtgctggcgctgtttttcgcctatctggcctacggcgccggggtgcagaacccgtgggtgcccttcgccttcctgacgggcggattcttttcgggactggccggctatttcggcatgaagaccgcgacctacgcttcggcgcgtacggccaacgccgcgcgccagtcgctcgaccgcggcctgaaggtcgcattccgcagcggcgcggtgatggggctggtcgtagtggggctgggcctgctcgacatttcgttctggtacgtcatcctcgaatatttcgtcgatgtcaccggaccgcagaaactcgtcgtcatcacgaccaccatgctgaccttcggcatgggcgcttcgacgcaggcgctcttcgcgcgcgtcggcggcggcatctataccaaggcggccgacgtgggcgccgacctcgtgggcaaggtcgaggcgggaattcccgaagacgacccgcgcaatcccgcgaccatcgccgacaatgtgggcgacaacgtgggcgacgtggccggcatgggcgccgacctttacgaaagctactgcggctcgatactcgccaccgcggctctcggagccgccgccttcgcttcggcggacgggatggccatgcagctgcgcgccgtgctggcgccgatgctgatcgctgccgtgggcatcgtgctttcgatcatcggcatcttcctcgtgcgcaccaaggagggcgccacgatgcgcgaactgctccgttcgctgggtgtgggcgtcaatttcagttcgctgctgatcgccggcgcgacgttcggcatcctctatctgctgggaatcgagaactggatcggactgtcgttctcggtcatcacgggactcttggccggcatcatcatcgggcaggccaccgagtattacacctcgcactcctacaagccgacgcagaagatcgccggaagcgcacagacgggacccgccaccgtgattatcgcgggtatcgggtcgggcatgatctcgacggctgttccggtcctgacgatcggcgtggcgattatcctcgcctacctttgcgccatcggcttcgacatggagcatatcatgtctgcgcagagcatgtcgctgggcctttacggcatcggcatcgccgcggtcggcatgctctcgacgctgggcatcaccctcgccacggacgcttacggcccgatcgccgacaatgccggcggcaatgccgagatgagcgggctgggacccgaagtgcgcaaacgcaccgatgcgctcgacgcgctgggcaacacgacggccgccacgggcaagggcttcgccatcggttcggccgcgctgacggcccttgcgctgctggcctcctatatcgaagagatacgcatcggactgctgcacaacggcgtgacggccctcgacctgcccaacggcacgacgcagctggtcgagaaggcttcgctcctcgattttatggagtattaccacgtgtcgctgatgaatccgacggtgctgatcggcgtgtttgtcggcgcgatgatgtcgttcctgttctgcggcctgacgatgaacgccgtggggcgtgcggcccagagcatggtgaacgaggtgcgccgccagttccgcgagatcaagggcatccttacgggcgagggcactcccgactatgcccggtgcgtcgagatttcgacgcgcggcgcccagcgcgagatgctgctgccgagtctgctggctatcgccgtgccggtggtcgtcggcttggtgttcggcgtggcgggcgtcatgggactgcttgtcggcggcctgagttcgggcttcgtgctggccgtgttcatggccaatgcgggcggcgcgtgggacaacgccaagaagatggtcgaagaggggcatttcgggggcaaaggctccgactgccacaaggcgaccgtcgtgggcgatactgtgggcgatcccttcaaggatacgtcgggtccgtcgctcaatatcctcatcaaactgatgtcgatggtctcgatcgtcatggccggcctgacggtggctttccaccttttttagtctgccggaatcccttgctgcgacggctgcccgcaaatgcgggcggccgtcgctgattcggcgggagtgcagattcgagacggagcatgccgtctgccgtttgccgttgtctgtttaccgcattctgcccggcgctttattgttcgctttttgcctgcggggttcctgtgcccgctgctttgcgtctgtcgcttagcgtccgttgtttcttggttgccagtccgctgcgttgttgtttgcttttccgccggttgtccgcagccggcctctctccggcggcggttctctgcgcgtcgctttgtatctgccgcaccgccgtccgccaccatatgtgaaaaagcctttcggccattagggccgaaaggctttcgtgtgtcggaagatcgcgtttgcggaggtgccgttatttcttgctcgcgccgctttcgagaatcgagacgatggagtagagcgtgaagcagatggcgccgaatcccgtcagtacgcgcgccgggacgaagtatttggtttcgaacagcgccgcttcgtagaggaacgcggcgaggaaaaggcacgccagcgccgtgagtaccggaatgatcggaatgcggttggccagcgggaaatcggcgtgccagattttcgccagcaggatcaccttgctcgaaatgctccagcagatcagcgccagtccgatcagtacgaagcccacgaaattgatcgactcgccccggaatgtgaagatcaggatcagccccagcacgaaagccagtccgcccatgcagagcaccagactcatccagcggcggcgttcgcccatcgtgtagctgccccgtgcctgacgggcgatgctggcgaccagcgcgatcagcgaggtgcagacgcaggcgatgccgaacatgacgctgcccgcgacgatatgcgccgggagcgtcccgatcgaaaacagcaggatgcaccagagccatgctccggcggccacggccgatacgatgaagatcagcagcgagctttgtccgcgcgagaatcccgcaggattgatcgagaaactgctgtcgcctgagtttttggggatcaggctgaatctggtcgaggaggtggcggccgtcgagacgcaggccgtgatgagtccgagtccgcagaccacatgccccgtgacgtatgcgcccgtcatgttcgacgtgatgatgaagattccgcagatgaccgtcatggcggcgaaagcgtaaccgacggccgggaaaagatacttcgcggcggcgctgtaggtgccgatgatctggcggatgatggtcgcggccgtgcagtagagcgcgacgcagatcgagccgaggaaaaagacgacgggacctgcggtcagccgtgaaggatcgcttccggcggcgaagacgtaggctccgtaaccgaaacagaatgccgccatcgcgaggggtatggcgcggaaaagaatgcttatgccgtggttcataaactgagtttttgttcgaacgcagacctgcaaatcccgaaccaaagaaaaaatggctatctttacgccatgaaaaatatcgttttcgacctcggcggggtgcttttcgcccgcgacaaaaataagtccacgcaggaattccatgaatttttcagcttcatccgctcggagcggatgccccttttctgggaggagtacgaccggggcgcatcgacgctcggcgaggtgaccgacattctcgcccggacgaccggctgcccgcgcgaaaagtgtgaacgttttctgctgctgtcgatcgacatgcaggagcctgtcgcgccgaccgaacggctcgtcggcgacctgaaggccgcggggtacaggctttacgtgctttcgaacatgtcgcgcgagttcatcgccttcctgcgccgttttcccgtctaccggcttttcgacggcgaggtggtctcctgcgaggaggggacggtaaagcccgaaccgcggatttacgaaatcctgctggaacgctacggactcgatcccgccgaaacccttttcatcgacgaccgcgcggcgaatatcgccgccgccgaagggctgggcatcgccggataccttttcgaccaccggaatcccgccgccgcatgcgacgagctgcgccgcaggctgctgtaacaataggaagcgataaaaataagagaggccggtgaaaaccggcctctctttgcattgcagtctttcggagacttagttgaacgtgtagcggatgctgaacatggctgaccaagtcgcaaccgtgctcgcatacttcgaccaaacgggcttggtgaagttgtaggcgttggtcttggtgttgtatttcagaatctgcgacgattcgagacggtcgatgccgcaccagttgcggttgatcaggttggcgaggttgttgatatcgacgcccagcgtgatcgtgttgcgcttgccgttgatattgatgtagaaatcctgcgcgaatttgaaattcaccatgtgctgccacggcatcacggcgccgccgcgcttcgagtattcgccgatgtgcttcgacaggtaggaatccttgttgatgaatgcccagaagtcgtttttctggtcggcggccgagtagatgaccttgccgttgtccaccagatcggcgaacgtcatcttgtcgagctgttcgcgggtcgggatgtagagaagcagggctgcaccgccgtcgccggtgacgttacccatcgtataggagtagcgcgagtaggagtaaccgccgatatagccgtgctggaacgcttcgtagtagagtccgaagttcgatgcgccgttcttctgcgccagacggtagcctacgttgaagagaatgcggtggggcgatacgtacgatgcgtatcccagttcgggcgtgttcgaaccgttgcggttgaacgtattggtgttatatgccgaagtcacttggtcgccgatgccgtcgatcacgttcttggcgctcgaataggtgtaggcagccatcagcgagagaccgaagccccagcgtttcgacacctgagcggaaaccgatgcgtaatatccgtcgatatcggcgttgttgatcaggtaaggattgatggagtatttctcttcgggattcttgtttctgatattctggctcttccatgccttgcgcagagcaggttcgcccggaagctgaatgcctgcggggttctcttcgataccgagtttggttacggttaccgagttgaaatccttgttgtagattccctcgatattcaggtcaacgtcacccggcagtttcagatccagcgccagcgaggtcttccacgtggagggcatcttgagcttcttgtccagaatggtaggctgcgtgttggccgccagatcctgctgtttgtaggtgccgccgtaaatgttcttcagcatgtcgttgacgttggtgtggaagctgggcatgcgcgaatcgcccttgtagagcgagagtccgttctggatgcagttgctgttgccggccaccgacaccagccatacgaacggcagacggccgttgaagacgcccgtaccgccgcggagaatgtatttgcgttcgccggtcatatcccagttgaaacctacgcggggagctacggccagacgtgctttgggcatgtccgaggtcttatagccgccgtagttggcgaaagcctgcgtgaagtccttgttctcgttgttgtcgatggaggggtaggagggcacctcgaaacggatgccgaccgtggccttgaagcgttcgctgaaattgatctcgtcctgcaggtagatcgaatactgcatgtaggtgaactggggatactcctgagccagtgcgtcgttgttgccgtgggcgatacggaacgccagcggttcgcggtcgttcttgaaatcgtcccatgtctcatagacgtagtagccggcgccgccctgcaggtagccgttcttggccacgttgtgctcgaactgcagaccggcgacgaaacggttcttgccgaccgtatagccgatttcgtccgtcacgacgtgcgtgctgacctcgcgcaggttgccgtacgtgaaggggtcgagaccgaacgaggcgtatacggcgcggttgccttggtattcttccagaatgtctacggtcgggaagagcttgccgtcgtagctgcgcggctcgtactgatgcgagtaggtgtaacgcagcgtgttggtcagacggccttcgaggaagcgcgaattcagctcggcggctaccgacgtgaagttctgctcctgatagtagcgcgaattctggaaatacatggcgtaattcgaagtacggccgtagttgttgcggtcataggccagtttgctgtccagcgggctgatcgaactggacggcgacgacgaatacttgttctgcgtacggctgaagcgtacgttgagcgagttgttgcggttgatgttccagtctacgcgggccatgagtttgtagccgggcgtttttaccgaatagccttggtagggaccggggttgtagccgtatttgtcgatcaggaaattgctgatttcgtcgagtttttcgaccgtcggacggttgtactgcgagccgccgccgaagctctggccctcgctggtgcgtgccagacgcgacgttcccggcgtggtgttccactcgcgctcgaagttggcgaacacgaagagcttgtccttgacgatcggggcgccgatgctgaagccgagggtggtgttgcgcatttcgctcagcgacagtttgccgccgtcgtacttgtcgccctgaagctggtcgctcttggcgaaaacatatgccgaagccttgaattcgttggttcccgacttggttacggcgttgatcgcaccgcccgtaaagccgctctggcgaacgtcgtagggggtgaccgataccgacatctgctccagtgcgtcgagcgagatgggcgagccgcctgcgggcaggttgccgccgatgccgaaggcgttgttgaacgcggcgccgtcgaccgttacgtacgactgacggtagttaccgccgccgatcgccagacccgacgtggtggtcgaagcctgcggcgtgagtttcatgatgtcgttcatgctgcggcttaccgaaggcatcagctcgatctgctcgctggagatgctcgtaacggcgcctgcgcggtttacgttcatcgagctgttgcggccgtcggccgtaacgactacggcttcgagcgtctggctgtccttcaggaaagcgttgcgcgtgagggtttcgcccagctgcagttcgagtccggggaactcgacgccctgataacccacgaacgagaaggtcacggtgtagggaccgcccgtacgcaggccctgcaggttgtagcggccgtccttgttggtcacggcgccgtactgcgtacccgaaggggtgtgcacggcgataacggtggcgccggcgaggggctggccctgttcgtcggtaaccgtaccgttcatgcccgaagtcgtcacctgcgcggaagccgcggcgacggtgaaaatcgagagcatcagaatgaaaagtttcttcataccaaataatttagttaataaaaaagggttttgttatggttttcgttgcatttgcgattcgcttccctgccgcagactcctgcaaggccgttttccggagtgtccgtaaaagcagagagggatacacctcgtccggagtatccctcgttacttatattatatagtcacgatgatctagttgcgttcgttttcgcacgttataaaagccacccccccccgcatatatacggaaaagatgcgaacagaccgatatgttgactaagtcagccataagtttcatagcacaaatataaatcaaatattccgacgccgcaatagaacatgcgaaatttttatcaaacaaattttcagtgcgttgccggggccgtcgggagggcttccggcacgttccttgcgcccgctgcggcgtatgcggaacttcagggaaagatactggcgctattcgcttttcgtgctgatcctcggactggggatcacgatctgcatcgagctgactccgtttctgggcggtctgctcggcgcggcgacgatctacgtgctgctccggcggcagatgcaggtcctgacggcctgccgccgctggcggcgcagtcttgccgcctcgctgctgctggccgaggcggtgctctgttttctggtccccatcagcctgatcgtctggatggtagtcaatcaggtgcaggacatcacgctccggcccgatttgatcattacgccgctcaagcacatcgcggcgctcattcacgagaaaaccggctacaacctctggcaggaggagaacatctcctcgatgatcggcatgattcccaagctggggcagtgggtcgtgtcgagcattttcgatttcgggatcaatatcgtcgtgctgctgttcgtgctttacttcatgctcatcggcggccgccgcatggaggattactgccgcgagatacttcccttcgacagctcggtgagcggcagcgtcatgcgcgaagtgcatatgatcgtccgctcgaacgccatcggaatccccctgctggccgtggtgcagggtatcgtggcctacatcggctacctgatcttcggcgctcccagtccgctgttctggggcgtgctgacctgcttcgcgacgatcatcccgatcttcggcacggcgctggtctggctgccgctggccggatacatggcccttgcgggcgagtgggggccggccgtggggctgacgctgtacggcggactggtggtgacgcacgtggacaacgtcgtgcgtttcgtgatgcagaagaagctggccgacacgcacccgctcgtgacgatcttcggcgtattcatcggactctcgctcttcgggttcatgggcgtcatcttcggtccgctgctgcttgagatgttcgtcttctgcgtcaatatcttcaagaagcgctacctcgacggcacgcctgataaacagctctttgtgcccggcggcgctgtcagggcgcatggcccggaagcccctgcggggcggggtgtttacgaaaagtaatcttttcggtcgttttttgtgaaaattccgtgcaaaatagttggaatttgaaattgtttattatctttgttattggaataacagtaaagacgggaaacaagaacccttaattcaaatatcacaatggcgagaaatctcaaaatcagagaccttacgttgcgcgacggacagcagtcctcgttcgcgacgcgcatgtcgcaggcgcaagtagaccgctgcctgccgtactacaaagatgcaaatttctatgcgatggaggtctggggcggtgccgtgcccgactcggtgatgcgctatctcaatgagaatccgtggacgcgtctggagaccatttacaaggccgtcggcaatgtgtcgaaactcacggccctgtcgcgcggccgcaacctgttcggctacgctccctatcccgacgacgtgatcgacggcttctgccgcaactcgatcgagagcgggctgggcatcatgcgtattttcgacgccctgaacgacgtggacaacgtcaaatcgacggtcaagtacgtcaagcagtacggcggcatcgccgactgcgcggtttgctatacggtcgatccgaaatatcccgaacccggtttcttcgccaagctcatgggcaaaaaaggccatgagcaggtcttcaccgacgcctatttcctcgacaaggccaagcagatggccgcgttgggcgccgacatgattacgatcaaggacatgtcgggtctgattccgccgcgccgcgtcgctacgctggtcaagctgttcaagaagaacatcgacattccggtcgatttccatacccactgtacgcccggctacggccttgcatcggtacttgcggcgatcatcgccggcgtcgatgtcgtcgataccaactgctggtatttcgccgaaggtacgggcgccccggccatcgagctggtgcacgtcttctgcaagaagctcggcgtcgataccggtgtgaacatggaggccgtcgccaagatcaacacccagctgcgcgagatccgcaaggaactcaaccagtcggtattcggcacggagaaacccgaacccaagcccttcaatccgctcaccgacacgctgcccgccgagatcgacgcgctgttcgacaaggcgatcaaggccgctcaggccgacgatgaggccgcgacgatcgacgcctgccgcaagatcgaggcttacttcggcttcccggcacccaacgaactggtgcagaaggccgagattcccggcggcatgtattcgaacatggtcgcccagctcaagcagctcaaggccgaggacatcctgccgcgcgccatggagctgattccctcggtgcgtctggccgcgggtctgccgccgctggtgaccccgacttcgcagatcgtgggcgcgcaggccgtgaactgcgccctcgacgagaaggccggacgtccgatgtacaccaacaaaagctcgcagttcgtggggctggtgaagggtgagtacggacatacgcccgtgaagatcgaccccgaattccgcttcaagatctgcggcgtccgcgaggagactccttacgatacgtcgaaataccagatgcagcccaatccggagcttcccgaagccggcggcgtgaaactcgccgcaaacgagaaggaggtcctgctgctcgaactcttcccgctggtcgccaagaacttcctgacggacatgaaggtcaaggcctacgccgcttcgaagcccgcggaacccaaggccgaggagaagaaggccgaggagagtgttgcggccgccattacgggcaataccgttacggcgccgctgcccggccgcatcatcgaattcaaggtgaaggtcggcgatacggtaaaagcgggtcaggaaatcgttgttctcgaagccatgaagatggagaactccgtgacgaccgattacgccggcaccgtcaagcagattctggcgcatcccggcgacaacgtggccaccgacgccgtgctggtcgagatcgtatagttccctccggcctgtttatccgaagaaaagctgcccgcgccctgcgggcggctttttttgattgcggattcggtaaatatcgctatatttgttccatcgattaatttaacctcagatttatggcatttttcaaagaattcaaggagtttgccctcaagggaaacgtgatggacatggccgtcggcgtaatcatcggcggcgctttcggcaaaatcgtgtcgtcgctggtgaatgacatcctgatgccgccgatcggggcgctgatcggcaataccgacttctcgcagctgcggctcgatatttcgaagttccgcgacatgacttcgagcgccgtgcatgccgtcggcgatgccgtgacgggtggaggcgagacggtggcgcaggccgccgtcgaacccgtctactggaattacggcgctttcatccagcagtgcatcgactttacgattctggcgttctgcgtcttcatgatggtgaaattgatgaaccgcctgatgaagaagaaggaggaggcccctgcgcccgccgccgggccggtgctgtccaaagaggagcagctgctcaccgaaatccgcgacctgctgaaggcgcagaagaaataggggatgtctccccgaaaagaggagtccggcctattggtcggactcttttttgtgcgagtactcctgcagtacgtaggtcgtgaagatcgggaagaacatcatgcccagcgaggggagcatcacgcagaatatcttgccgatggtcgtcacggggaatatctcggccccgacggtcgtgacgttcatccacgcccaccacagcgcgttgccgaaaccgtggagcttgctgttcacgagtatttcgtaatcgtagaagaccagcgccgaaatataggtgaagacgaccacggtgaagatgtaggcgaagaagagttttcggaccttgttgtccacgagccactgcaccacgatgtaaaatgcgaggaacgcccgcatcagcggcatgatgccgatcagcgtggcccagtagcgggggagttcggcgccgctccagtcgatgatgttcagatagggtatcgaaatcagcagtacgaggaaattgcgggcgaagaagcggcctttgcgctccgaggctgcccaccgtacgaagaaatcgcataggaaaaggatgcagaccacgagctggatgatcaggtagttgcgtgaaaagtgcatgtggtcgccggcgattatttcccacgaaatggcggcgagcagaaccactccagcgattactttgaggatgctcaggcagttacggatctccgtgcgtgtagattctgacagggacatattttcggtttacgtgcactcggctcaaaatcagtgccaaagcgtcggaatgcgaattttccgtcgattttttgcccgaagattttgcacgatcgaaaatttctattacctttgcactcgctttgatagcaatggcgggttagctcagctggttagagcgcatgattcataatcatgaggtcccgagttcaagtctcggacccgctacggaaaaaagcgaccgcgacatttgtcgcggtcgctttttgtttttgcgctgtttgtttccctcctcagctgtgccgccgggccagctctttttcgaggtcggcgaccgaacagccggtcgcttcgagcagcaccagcaggtggtatacgaggtccgacgcttcgtaaatcatcgcctcgcggttacccgccacggcttcgatcacggtttcgacggcctcttcgcctactttctgtgcgattttgttcacgccgcggtcgaacagcctgctggtgtacgatccttcgggcatctcggcgtgccggccccgaatcacgctctggaggtaacggatgaagccttcggtttcgggcgcggcccccgcgaagcagctcttggcgcctgtgtggcaggtcgggccgtgggggatgacgcggatcagaagcgtgtcgtcgtcgcagtcggccgtgaccgaaacgatgtcgagatagttgccgctggtctcgcctttggtccagagacagccccgcgtgcggctgtagaaggtgacgcggccttctgtcaggcttttttcgtaggcttcgcggttcatgtagccgagcatcagcacctgcagggtgcggtcgtcctgtatgacggcgggaatcagcccgtcggtctgttttgcggagtcgagttccgcaaagggttttgctttgattttcatggcgtttataatcttacgttgatgttttgccggtgcagttcccgtttgagcgcgggaatcggaatttcgttgtagtggaagatgctggccgccagcgccgcgtcggccctgccgagcgtcagcacgtcggcgatatgccgcaccgagcctgccccgcccgaagcgatgaccggaatgggtagttcggccagccgtgcgaacgtttcgcaggggtaaccgtcgcgggtgccgtcgtggtccatcgacgtgaagagaatctcgcccgcgccgcgccgccatacttcgtgcgcccacgcgaacagttcgcgctcggtgagccgcttgccgccgtgggtcgtgacgcgccacacgccgtcgatctttttggcgtcgatggccgcgacgacgaactgtgaaccgtatttcgacgcgatggcgtcgatcagcgccggatcgcgcacggcggcgctgtttaccgtgaccttgtcggctcccgcgtcgagcagccggcctgcgtccgcgaccgacgcgatgccgccgcccacggtgaacggaatgtcgatgcgcgccgcgatgcgcgacaccagcccggtgaaggtgctgcgcccctcctccgtggcgctgatgtcgagatacaccagctcgtcggccccttcggccgcgtatttcgcaccgagttccaccgggtcgccgacgtttttcagctctgcgaagttgatccctttgaccgtctgcccctcgcggatgtcgagacagggaattatgcgttttgcaagcatcgcttcagttcttcgagtgtgatacgtccttcgtagagggctttgccgacgatgacgctacgcaggcccgcgccgtcgagcgcctcgatgtcggccatcgagccgatgccgccgcttacggtgatctccacgccgggaaaattgccctgaagtgcggcgtaaaactccgccgatgcgccgcagagcatgccgtcgcgggcgatgtcggtgcagattacctgcgagagtccctgcggcgcgaactgcgcgatcagctcctgagccgagagttcggacgcttccgtccagccctgaacggctgctttgccgtcgcgtatgtcggctccgagaatcagctttcccggcccgaattccgcgagccatccggcgaaaagctccggccggcgtacggcgacgcttccgcagatggcgcggcgtgcgcccgcgtcgaatacgctgcggagcgcctcggtgcttttgatgccgccgccgtactgcacttcgagcgcggttttcgacgctatgcgttccagcacggcgaggttgcggggctgtgcggccttggcgccgtcgagatcgaccatgtgcaggcggcgtatgcccgtctcttcgaagcggagcgccgcttcgagcgggtcgctgtaataggtcgtccggcggccgtagtcgccctgcgtcagccgcacgcaggcgccgccgataatgtccgttgcgggtatgatttctattttcatcgtgttacggttttaaaaagttgcgcaggatcctttcgcccgccgaaccgctcttttcggggtggaactgcgtgccgaaaaagttgccgcggcccagcgcggcgctgaactccccgccgtaatcggtgcgggcgatcgtcgcttcgcagacctccgccgcatacgagtggacgtaatagacgtaggtctcttcgtcgattccttccaacagcgttccgcgcaggccgccgacggtgttccagcctacatggggaatcttcagcccgttttccgcgggtttcagccgcctgacgtgcgccgggaaaatccccagacagcgggcgtctccctcctcgctgtcgagacacaacagctgcatgccgatgcagatgcccagtacgggctgcgtcagggtggggatgaccagatcgagtccccgctcgcggagtttggccatcgccgacgaagcttcgcccacgccgggcagcagcaccctgtcggcgccgcgcaggagcgcgggataggccgtgatcgtgaattcggccccgatgcgccgcatggcgtcggcgaccgaccgcaggttgcccgtgtcgtaatctactatcgccgtcataatactcctttgctgctgggtatgtcgtatccgaatccgctgcgggccacggccatgcgcagggcgcgggcgaaggccttgaagatcgcttcggccttgtggtggtcgttgtcgcctttggccgcaatctgcaggttgcagcgcgcggcgcagcagagcgagtggaagaagtggcggaacatctccgtcgggacgtctccgacccgctcgcggcggaattcggcgtcccactcgaagtcgatgcgtcccccgaagtcgagcagcaccagcgcgcggcagtcgtccatcggcagggcgaatccgtagcggcctattccggccttggagcccaaagcccgatcgatggctttgcccagcacgatcgccacgtcctccatcgtgtggtgttcgtcgatgtccagatcgccgcgggcctccacttcgagcgccacgccgccgtggtgggcgatctgcgccagcatgtggtccagaaaacgcagtccggtcgaaatcccgtcgccgcagtttctattgtcgccgttcccgttgtcgtcgttcctttcgtcactgctgctgtcgttgatcctgctgttgtcatttccgtcgtcgcggtttctgttgtcgccgttccttccgtcactgttgttgtcgctgtcgccgtttccgtcgccgctgttcctgccggcgtcgttccattcccctgccggatttttcgccccggcccggttgccttccggtccgttgtctgcgtccggatcaaccgggtttttcgtatccgcgccgttctccggagcgccgccggttccggcggccggacggtctggcgaaacgccgccgaaccctttgccgtcgaggtcgagccggacggtgatccgcgtttcgcgggtctcgcgcgttacgaccacccgccgttcgccgcggcggatgtactcggcgatctcggaccacgaatcgctgatcagcacgcagggctcttccgctccggcttcgcgcagcatccggcggcccgccgtctcctgtgcgaacagaattccccgcgctccgagattgcgggccaacaggatgtcggtcgcgcggtcgccgacgacgtaactcgccgcgaggtcgtaccctccgccggtgtagcggccgaacattcccgtgcggggcttgcgcgtcggggcgccgtcgctttcgaacgtgcggtcgatcagcatgtcgtcgaacagcacgccttcgcccgccagcgtgcggagcatcttctcctgcggaatcctgaaatcctcctcaggaaaggagtcggttcccagtccgtcctgattggtggccatcaccagctcgaaatcgagtccccggaggactttgagcgccgaaatggctccgggcacgaattccagcttggcgaggctgtccacctgcatatccacgggcggctcgacgatcagcgtgccgtcgcggtctatgaacagtgcttttttgagtgcttttttcatggtctgaagtttttgacggtttccagcatgcgcccgttttcggcgggagtccccacggtgatacgcaggcagccctcgcatcccgcgatccgcgtacggttgcggacgatcacccctgcggcgatcagttcgccgtaaagccggtcgggatcggcggtcttcaccagcaggaagttggcctgcgacgggtagacccgctcgatgcagccgcatccggcgagcgccgccgccagccgtccgcgttcttcgcggatttgcgcgatctgcgccgcaatgttccggcgcagacactcggccgcggtctgctgggtgagcgtattgatattgtagggatacttgacctgcccgaacagcgcggcgatccgctccgacgcgaaagccagtccgagccgcagtcccgccatgccccaagctttggagagggtttgcagtacgatcaggttgggaaattcgtcgagccgcggcaggaatccccgcccttcggcgaagtcgatgtaggcttcgtcgagcaccaccacgccgtcgaagcggcgcagcagctcttcgatctcccggtcggggaatgcgtttcccgtggggttgttgggcgagcagagccacagcagtttggtgcgcccgtcggccgccgccagcaacgcctcgaccggaagcgagaaatcggctcccagcggtacttcgcgcagttcgacgccgttggtctgcgccgccacgcggtacatgccgtaggtcggcgcgatcgaaacggcgttgtcgcggcccggctcgcagaagatcctgaacgcgaggtctatggcttcgtcgctgccgttgccgaggaatatttgtccgctccgcacgcccttcagcgcggccagctgcgccttcagctcccgctggtgcgggtcggggtagcggttcacgccgttgtcgtaggggctttcgttggcgtcgagccagacgccgatcccgccgcccgcatattcgtcgcgggccgtggagtagggttgcagcgccagaatgttgggccgcacgagctgcgccagcggtttcatcgcgcacctccttccgtccggatgcgcacggcgttggcgtgtgcgtccagcccttcggcttcggccatggccgtaatcgtcggcgcgagggcttcgagtccgccgcgcgtcagttcctgataggttatcttgcgcatgaagctctccgtgttcacgccgctgtaggcccgcgcccagccgcccgtgggcagcgtgtgattggttcccgaagcgtaatcgcccgcgctttcgggcgagtagccgccgataaatacgctccccgcggccgtgatccgcgccgcggcgtcccatgcgtcccgcatggcgacaatcaggtgttcgggggcgtaggcgtcggcgaacgcgatctgctcgtccgggtcgctgaaaaccacgatccggctgttggccagcgaattgccaattgcgtcgcggcggctgagccgcgcggcctgctccccgacggacgctattgcccgctgtgcgaactcctcgctgcggcagaccagcacggcctgactgtcatcaccgtgttcggcctgcgacagcaggtcggcggcggcgaattcgggccgggcgtcttcgtcggccagcaccagcacctccgaaggccccgcgggcaggtccacggcgacgtcggctgcgccggccagctgtttggctttggtgacgtagcggttgccgggaccgaaaatcttgtcgacgcgcggaatgctctccgttccgtaagccatggccgccactgcctgcgccccgccgagggcgaagacgcggtccacgccgcagaggtcggccgcatagagaatttcgggtgcgatccgcccgtcgcggccgcacggcgtgcagagtatcacctcgcggcatccggcgatccgggccggcagggcgagcatcagcaccgtcgagaagagcggggctttgccgccggggatatacagccccgcgcggccgatcgccacggcgcgctgtacgcacctgacgcccggcatcgtttcgacctcgacctgcgccgggagctgcgcccggtggaaggcttcgatgttggccttcgcctgctccagcgcggcttttaactgcggcgatacggccttcgcggcttccgcacgccgttcgcgcgtcacttcgaacgtttcggggaggtatccttcgatgcggcggacgatccggcgcagggccgcgtcgccgcccgtgcgcacctcggcgaggatcgcggctacgcgctccccgatctcctcctcctgccgcgtacagcgggccgtcagcgccggccattcgctgcgcgggggatttacatagattttcggcatttccattttttcgggtcgtttttaggggtcagcggatcatgttttcgagcgtcagcaccagaattccttccgcgccgagggccttgagccgttcgatgcgctcccacaactgcgattcgcagatcacggcgtgtatcgagcaccatccctcctgcgccagcggcaggacggtaggactgcgcatgcccggcaggatcgtgatcgcttcgtcgagcttctcctgcgggaggttcatcagcacgtacttcatgccgcggctttcgagtatcgagttgaagcggaacgtgagttgggccgtttcacggcgtttatcctcatcgagttccggatttgcaatcagcaccgcttcggaataaaataccttctccacttcgaccaatccgttcgagatcagcgtgccgcccgacgatacgatgtcgaatatcgcgtcggacattcccacggcgggggcgatttcgaccgacccttcgatggtgtgtatttcggcgtcgatgcccttctcggcgaagaaccgcgcgaggatgttggggtaggaggtcgccacgcgcttgccgcggaagtagtccagtccgttgtaatccgccgtccggtccacggccagcgagatgcggcagctgccgaatccgaggtccatggtccgttcgaccgggaagttcttctccgcgacctcgttcagccccacgatccccagatcggcgacgcccatggccacggcctgcggaatgtcgtcgtcgcgcaggtagagcacctccatcgggaatccgtcggcgcgggagatgagtttgcgcttgctttcggcgacgccgatgcctgcttccgagagcaggtcgatgctctgctcgttgagtcggcctttggcctgaattgctattctcagcatgtttgtttgttgtttttcagacacccgcctgcggaacggacatgaaaaaagcccatccgcaggggatgagcttcgttatgatatataatccttatttacatatgcacatcgatcttaccccttcggaaagtggttgtgatgatgatggatatggttgaatattgtcatttgcaatgtcgttgggacaaatgtatgtatttttggatgaaaaatcaaaatttctgccgaaaagttttcgataatcttccgccggtgccgccgaaaaccctctttgctttcggtgttcagtcgtttgttgttttgattgtcagttgtttgagtcgtttgtagattcgctgcgtcttttcggttcgcgggccggtgatttgtcgtcggacggccgcgaatggccaccgccgagccgcgaaagacggggttgccggtttcaatatacggattatgcttatctttggaggtctgcctaagcagtctttagtaaaatattgttgttatggaaaccgaaaagaaacgtatcgaatataccaacggcgagatcgtcgtggtctggcagccgcacctctgcatccattcgggcgtctgcgtccgcatgcttcccgaagtttacaacccgcaggagcggccgtgggtgaaactggaaaacgccacgaccgaccggatcgtcgcgcaggtcgaaaaatgcccttcgggagcgttgtcctatcgtaaggcgtgacgcccgctcatcccgttgaaaagccgcccatggatgctgaattcgtcgatctgacggcctaaaaccttgccgacgagcatttgtgctgcattatccgcacgaaaaaggcccatccgggcgtagaggcgaagcggcggtggctttccgaccggctccgcgaggggcacgtcttccggaagctgaatgcgaagggcgtggtctttatcgaatacgcgcctctcgaaacggcatgggtgcccgtgattggcgacaactattattatatctattgtttgtgggttgcgggtccttacaaaggcaagggctatgcaaaggcgttgatggaacattgtctggccgatgcgcggacgcatggaaaatcgggcgtctgcatgctcggtgcggaaaagcagaaagcgtggctttcggaccagtcttttgcccggaagttcggcttcgaggtcgtcgatacgaccgacaacggctacgagctgctggcgctttcgttcgacggaaccactccgcaattcgcgcacaatgcgaaaaaacagcgtatcgaaagtcaggcgctgaccgtctattacgatatgcagtgcccctttatccccggcaatctggaaatgataagacaacactgcgaagcgcacggtgtcccggcggatttcatcgaggtggatacgctccgcaaggccaaggagctgccctgcgtattcaataactggggcgtcttctacaagggaagattcgaaacggtgaatctgctggacgccgcggccttggaacggatcctgaaaaagtgattcccgccgggactgtctccctatatcggccctcccctcgaaaaaatctccgaacccttcgtcgttccggatgctccatcccgcccgtccccgcattattctgctttttttgcccgctttttcgggactcttttcgtatatttgtaattcgaatctgaacttacgcttatgacatccgccgccgttatcgctaccgttctgggctacatagccgtcctcttcgccgtagcatgggtctccggccgccgcgccgacaacgccgggtttttctccggcaaccgccgcacgccgtggtacatggccgccttcgccatgatcggcgccgccatgtcgggcgtgacgttcatctccgttcccggctcggtcgccgtagacggcttttcctacatgcagatggtcgcgggcttcacggtcggacagctgatcgtcgctttcgtgctgattcccacgttctaccgcctgaaggtggtgtcgctctacgaatacctcgacgaccgcttcggcgtgcggtcgcaccgtaccggggcgtggtttttcttcgtctcgaagatgctgggggcggcccttcgcatctatgtggtctgcgccgtgatgcagttgctggtcttcagccattacggacttccgttctggctcaatgcggcggtcacgatgctcttcgtatggctctacacccagcagggcggcgtcaagtcgctgatctggaccgatacgctcaagacggtgtgtctggtgggaagtctcgtgctgtcgatcgtcttcatcatgcaggcgctgggcatgtccctgcccgaaatgacccgcgaggtcgccgcgtcgccctattcgaagatgtttttcttcgacgacccggcttcggaccgctatttctggaagatgtttgcggcgggcatcgtgctgctgatcgccatgacgggactcgatcaggacatgatgcagcgcaacctgagctgcgccacgccgcgcgactcgcagaaaaatatcgtcctcacggccgtcagccagattttcgtgatcttcctgttcctcgtgctgggcgtgctgctttacatctacatggaccgcagcgggctggcgatgcccgaaaagggcgatcaggtcttttcgcaggtcgcagtcaacggcggattgccggtattcgttggcatactgttcgttataggacttatttcaagcacctattcagccgcaggatcggcccttacggccctcacgacttcgtttacggtcgatatccttgacggcacgaaacgttacggcgaacgacgtctgacccgcctgcgccgcatcgtccatgtggcgatggccctcggcatggcgctggtgatcctcgccttcgaataccttgccgacgacagcgtcatcaatctggtctacaaggtcgccagctacacctacggcccgattttgggtatgttcgctttcggtatcttcacgcgtctcagggtgcgcgacggctggatgcccctcgtggcgctcgccgctccgctgctgagcgccctgctgcaatactgggcgtatgaggcgtggggttaccggatcggtttcgaactgttgatttacaatgccgcatttacgatggccggcatgcttttactggtcaaacgacatgaaaaatagactgttgtatattctcctgctgctcggtctgtgcgggcaggaggtctcggccgccggaatcgacggccctgcgcgccgcgaaatcggacgcacgctgacgcgcatcgtcgcccgcgaagtgtcgggcggctatgtccgcatcgagggggtggacgcctcgcgcaagcgggtgcgaatctacacctcggtcggcctttcgtactatccgttccgcgaagagaacctgcgcgccatgcgcgactcggtgcgtctgctcatgccgccggagttccgcaaggcggacatcgaactttattccgacaagcgggaggtcggcgagctgattccgatggcctgccgaaccggggcggaataccggaaacttttgcgcaagaagaagatcgtgccctttaccaaccgctccgagcggccgctggtgacccgttcttcggcgcccgtggtgccgtcgcagggactcgccgggcggcatatcgccttgtggcagagtcacggccgctatttcgaccagccccagaaccgctggaaatggcagcgttcgcagttgtggcagacctgcgaggacctctatacccagagctacgtgctgccgtatctggttccgatgctcgaaaatgccggggcctgcgtgatgctgccccgcgaacgcgacgtgcagaagtacgagatactggcggacaacgatgccgccgggcagtaccgcgaggaggaggggcctgagaaatggcagccgggcggcatgggcttcgcgcatgtgcagcaggtctacacgacgggacagaatcccttccgggacggcacgacgcgccgcgtgagatcggtgaccggcggggcggagagccgcgccgtgtggacggccgacattcccgaacggggcgaatacgccgtttacgtgagctacgattcgactccgcaaaacgctgacgacgcgcagtatacggtgcatcacctcggaggggacagcagcttcgccgtaaatcagaccatgggcggcggaacgtggatctacctcggccgctttctgctcgacgccggttcgcaggaggtcgtgacgcttaccaaccgctcgcgtcaggcgggccgcatcgtctcggccgacgccgtgaagatcggcggcggttacggcaacatagcccgcacggtgtgcgattcgctgcgccggcccggcatggtgtgccatttggagacgagcggttatccccgtttctgcgagggcgcccgctactggctccagtgggccggattcgacgaaaaggtctactccccgaaggagaaccgggacgattacaaggacgactacatgtcgcgcgcccattgggtcaatgccctgacgggcggttcggagcggatgcccgacagcgccgggctgcgcattccggtcgatatggcgctggcgttccactccgatgtgggcgtgcggctcaatgacgacatcatcggcacgctgggcatcttctatacgcgcgagaacaagggcaagttcgaagggggcgccgaccgctaccgttcgcgcgacctcacggatatcgtcatgacccagatcgtcgaagatatccgcagcacgtacgaaccggcatggagccgccgcgggctttggaaccgcgcctattacgaagcgcgcgtgccgggggtgccgaccatgctgctcgaactgctgtcacaccagaatttcgccgacatgcgctacggcagcgatccgcgtttcaagttcctcgtgagccgtgccgtctataagggtatcctgcgctatatcagctcgcaatacggattaccttacgtagtgcagccgctgcccgtggagtcgctcgccgtgcagttcgccgaaggtggcaaggcggcggtcacttggtcgcccgtgatggattcgctcgaaacgaccgcggctccgacggggtatgtggtctatacgcgcatcgacgacggcggcttcgacaacggccgttacgtcgataaaccctgcctgctgaccgcgcaggagccggggcgcatctacagctacaaggtgacggccgtgaatgagggcggcgagagttttccgtgcgagaccgtcgccgcatgccgcatgcccgacgagaaggggacggtgctgatcgtcaacggcttcgaccgcgtcagcgcgccgctgagcgtgcgcgccgattcgctggcggggttctataccgacatcgacggcggcgtgcccgaccggcaggatatttctttcatcggcgcgcagcacgtattcgacatgcagatggccaaatgcgaggtagacagcatcgctttgggtgcctgcgcctgcgattacgaaacggaggtgatcggcggcaacacgttcgactatcccgccctgcacggacgttcggtcgcaggggccggatattcgttctgctcggcgtcggtgcgcgccgtcgagcgcggcgaggtgtcgcccgacggttattccgccgtcgatctcattctgggcgaacagcgttcgacgaccatcggacgcggggtgacgggctatgccttcaaaaccttctccccggagttgcaggccgttctgcgccggtatatggccggcggcggtgcgctcttcgtgtcgggaagctatgtggcgaccgacctctggacgggcggcgaggcctcggacgacgaccgcaggttcgccgaggaggtgctgcactacacctacgacggcggccgggcggcgcagcgcggacgggtgcgggttgtgacttcgcatcccggattttcgcgcgacgagtaccgttatgtcaatgaataccgtccggaccgctaccgggtcgagtcgcccgacgccctgcggcccgccggggcgggggccttctcggtgatgcgttacgtcgaaaacggccgcacggcgggcgtggccagcgaagcgggcggaacgttcgtcatgggatttccgttcgagtccatcgagagcgacgtgcagcgcgaccggctgatgcgcgacgtgctggacttcctgctgaagcaaaaggatagatgatttgtgtatttatttaaaaatagtaattttatgtcactcgaacaacagatttcgaaagggatcatggaggccatgaaggccaaggataccgtgcgtctgggcgcactgcgcaatgccaagaaatacatcatcgaagccaagacggcgggaccggaaatcaccgaactgcccgacgccgacgtgctgaagatcatctccaagctggccaagcaggggaccgactccgcggcgatcttcaccgagcagaaccgcccggacttggccgccgaagagctggcgcaggtggccgtatttcaggaattcctgcccaagcagctcactgccgaggagcttgccgccgaggtcaaggccgtgatcgccgaggtcggcgcgacgtcgatgaaggagatgggcaaggtgatgggcgtcgcttcgaagaggctcgcaggccgtgccgacggcaaggatatttcggccaaggtcaaggagttgttggcgtagggcggcggatgagacggttgctgctggttgtttgctggcttgccgcggcgcagacggtctgcgcccgcaaacccgccgtgcgcttcgacctgccttacacgctcgaacggggcaagtatgtcgtgacggtcgagaccgctgcgggaccgcgccgctttgccttcgacacgggggcttcgaagacctgcatcagcgaacggctcagccgcgaactgggactcgcggcgtctggccgtgggacgtcgggcgatttcgaaggtcatcgtcatgcgatcacctatgtccgggtgccgtatctccggatgggcgaggcaacctactccgaccggcaggtgatcgtgctgcccgacagctcctatatcttccgctgtctgggcttcgacggcattgcgggcagcgatctgctgcgcggcttcgtcgtgcggatgcccaatgccgactcgacgatcacgctggcgggcgacctgcgccagctcggcgggttccgctgccggggcggtgcgcggattcactttgcgggaaacgctcctgtaatcgccgcccgtgtgggctgcggcaagtcccggatgaaaacctacatgaaattcgataccggctccggggccttgttcgactgccgttacgacgagtgccgggcgatgatcgaaaaggggattttgcgggaggtgcgccgcacggagggacactccggcaatctggggtggaccaaccggtcggtcgtcggtgaagccgtgcggggtgtgattcccgaattcggactggccggaaatacgcttgccgggatgcccctcgaagtgacccacggcggacacagcaagctcggatgcggagttttccgctggggaacggtcgtgatcgactatcccggccgccgtttctggctgctgccgcatgccgaaccgcccggaccgcccgatgtgtcggtaagcggcgtcaccgtcgcgctggacggaggacggctggtcgtggggcaggtctgggacgagacgcttgcggatagggtggctccgggcgaccggatcgtatttctcggaacggtggatgtgtcgcgggtcgatccctgcgccgtaatccggggtgaaatccgcggcgacaaaccccagatgacggtcgaacgcaaggacggtacccgtgtgacggttccggtaaaaaggatgaaataaatgcacgtattggaatatctgcaccgcaatgtcaagacggtcgccatgccctcggccatggtggcgggcgccttgctgtgccgtccggtgacggcgctcgaagcgtggacgcaccagatgattacgccctcgctgatctttctgatgctcttcgtcaccttttgccgggtgaaaccccgccagatgaagccgtcgatgctgcacgtgtggctgttgctgtttcaggtcgtggtgagcgcggcgctttatttcacgttgctgccgctcgatgcgatcgtggcgcagggtgcgatgatctgcgtgctggcacccgtggcgatggccgcggtggtgattgcgggcatgctgggggccaacgttccgacgatggcgacctacagcctgctgtgcaatatggcgatcgcgttgatcgcgcccgtcgtgctttcgctggccggaaccggggcctgctctttcacgcagatactggcccgcatcgcgccgctgctgatcatgcctttcgcagcggcgcagttctgccgttttctgctgccgaagaccgcgaaatggatcggcgaccacagccagatttcattctatatgtggctggcgtcgctggtcgtgattatcggacgcacgacggcattcatcatcgacctgcacgatgcgtcgctctcggtcgagctgtggctggcgttcgccgcactggcgatctgtctggtgcagttcaaggtgggccgcatgctcggccgccgttacggggacgcgccggcgggcgggcagtcgctcggccagaagaacacggtgctggccgtatggatggcgcagtcgttcctcgaccccatctcctcgatcgccccgacggcttatatcgtgtggcagaacttcgtcaattcctatcagatttatcgccacgatcagcggaagtcggattgagcgccttcggcgtcgggcttttcttccgcctgcaatcgtcacgaaaaataggacagccgcgatttcgggtcgcggctgtcttgtgtgtatgcgaggctgttaccggacgagggttatttccggaagatgaaatagacggccagaatcaggcagaggaatccggcgaggtggttccagcgcagggtgtcggatttcatgaagaccaatgcaaagagcgtgaatacggaaagcgatacgacctcctgtatcactttaagttcccagatggagaacgggccgccgaactgcgcggagccgatgcggttggcggggacctgaaagcagtattcgaacagggcgatgccccagctcagcaggacgatcgccagcatgccgaagcgttcgagtttcgatttgaatgcgatatgcccgtaccatgcgagcgtcatgaaggcgttcgatatgacgagcagaacgacggtggagattcctttgaacatatatgcgtccgggttaaaaatcccgcaaatgtatcaaaaatttccgtacgatatccgcttcggggaaatatttgcgtcggccggccgaatcccgaatccgggaggagcagagggaaggtaatgctgaggaggttgcaaagggggcgcgaggggcaggaggcggggcgttttcttgggtcgggcttctgagagggggcagccgatccgcatgatccgccgaaggggcgccggacaaaaatcccgaccctattgaggtcgggaattgcggcggccttttgcggggccgtgcgcttatttcagcaatgtttcgaggttggtgatgtcgcggaagtcgccgatgatgacgtcggcgtcggtttcggcggccagcatttggcgggagtgcgtggacgccagcgcgacgatgcggcccgcgccggcccgccgtgccgactcgatgcccgccttggcgtcttcgaagacgacgcattcggccggtgcgagtccgagtgcggccgccgccgtcaggtagatttccggatcgggtttgcagcgcgtcaccatgtcgccgttgattttggcgtcgaaaaaggattcgatgtcgcacttctcaagcacgaaatcgacattggccctgcaccccgacgaacctacggcgcagcgtatgcccgcatcgcggagcttgcccagcagggcgaccagtcccggcatgggttcgatttcgggagcgtagatttcgcggtagatggcctccttctcgtcgccaagcgccgcagttcccttctcgcggatcacctcttcgggcatgatgagccgcatgatgtcgtcgttgcccctgccgaaagctcctcccagtttctccttccagccgcgcacgccgtagcggtcgcagaagatttcgaacgcccggatgtggaccggcgaattggccacgagcgtaccgtccatgtcgaatatggcgccttttatcatatgattccgtattttaagccccaaaggtagtcaaaatcttcgacacaaggaaccctatgtcagaatttgaggtgcatgctcaggtttacggcgaagttctgcacgtcctgtcccggcttgggatcgcggtgggtgagacgccagatgcagtccacgcgcagcaggcggaagatattttcgacgccgaagcccatttcgacgtaagggtccgaaaccgacgtcatgccgcgggggaagagcagtggggcctgcgtgtcgggcagactgccgtcgttctccttcgagagcgtgccccacacgcccttgcagaccagcacttcgcgccacttgagtttcttgacgagcggaatgcggcccagcaggatgccgttgaagtggtgttcgaagaagagcgccacccatgcgtccgatgcgaattcgtagaaattcatgcacgagaaggcattgggatcgtagaagtaggtgccgttgccttcgtggagcttgagcagcggataggggaccttgccgaagattttgccgccctgcagcgtgatgttggaatagcccagcggcggcagttcgggtttgtagtggatgcccccttcgagccggtagtattcgtagctgtcgttcagcatggcgggaacgccggccgtgaatccgagcgtcaggacggggtagaccgtgcccatgtactgcttgtcgaagggcaggcggtagatgctctcgttcttcgaaatacgcatcccgacgtgcagcgcggcgtccgatacggagtttacgatccggccgtcgggacgcaccagcggcacgtagcggttgccgaagatcttctggatgcgggcgccgaggaaattgctggtgccgtggctccattcgtgttcgtagccgatctcgccgcggttgaccatcgaaagccgggagtcgccgcgcgagagcagcgagctgaggatgttgctctccgtgagcgcgttctgtcccgcgcccagctgcatcacgtcgtgccggcccgaaacggtgagcttgcgcgtcaggcggcggttgaaggccagttcgatgctgccgccgcccttgaacatgccgtcgcgcgtgccgtaggccgcatatcctgagagacgtatgcgtttgctgacggccgtggtcgtgcggaatcccggctgcatgcggaacccttcgagtttgttgaagctggccagtttgtaataggggccgataccgatgtatttggtgttccagtaaccgacgatcacggtgttgatgagcgtgtagatgttgcggtagagcggcacgttctgcaccgaatcgaccatcgagtagatgcccttctccttgtcgctcaaccggtaggggcgcacttgttcccagaaggcttcgtccgtgcggctgactccctcttcgtcgccgatgacgacgttgttgtccatgcgcgcgacttcgtcgggaatgggaaccccgacgcgcacgtcggagtagaccacttcgcgcgtgccgatgaacgaggtcagcttcgacgagtcgcccgtggcgatcgaaaattcggccgacacccggtcgcggtggcggaaccacgtgctgtcggcgacgatgcggttgtcgttttcgagccgcaggtgcttgatccagtttacattgacgcccttaggcatgcgcgccgaggccgactgcagggcgtacgacgccgagtcgatattgacttcgccgtcgagtacgggcgtggcgagccgcttgggatggaagcggattttgtaggttttgcgcccctccacctgcatgctgtccaccagaaaatagtcgtagaaggccagacccgaatcggagagcggactggcgaagcggacgttgaagatgtcgatgtaattggcgtagaaattgacgttgccgtgcatccggcccgtgaactgggcgatggcgaagctgtcctcgacgcccgacacgcggctggcgcggatgatttcgcgcgaaacggcgggggtgcgcctgctgtggtaatagtcggccgtggcttcggagatcatggccggcaggtaggcctgtccggtgagcgccgaggtgtcgatgtagtcgaagacgaacccgaaattgcgttgcagccgcttgctgcggaaccggggcttgatgttcgtcaggtcgagctgcatcttggtataggtggcgcaggtgtagctgtcgtacaggtcgggatcgttctggggcttgcggcggatgacgccccgcagaatcggatgcgccgggttgtcgccgggggtgatgacgacgctgccgatgccgaactccacggcttcgagggcgaagtcgatctggttgaagcctccctgcacgagcggcttggtctgcgaggcgtagccgaccatcgaggcctgcacgcggctcaccgtgtcgcgggtttcgagtgtgtagatgcccgcctcgtcggtggtgatgcccgtcgtggtgccgggaaagacgacgctcacgaactgcatcggcgtgccgtcggcggcgtcggtgacgcgcccgcggacacgggtgctctgcgccggcaggacggtggggaggaacagaaccgcgatgagaaaggcgagcggtttgtatgtgatttttcggcgaagcatctgacaaatgtagctaaaatgcgacaatccgggtaaaataaactacctttgcgcaacttaagccgaaaaattgaacatcaagagctgagatggcacacggaaaagtcgaaaagacgaatgcggcgcggctgctcgaccgtgcgaagataaattacgagctcgttccctacgaggtggacgaagagcatctggcggcgacgcacgtcgctgaacagctgggcgaggagatcgccacggttttcaagaccctcgtgctgaaaggcgaccggacgggatacttcgtctgcgtggtgccggggaatcacgaggtcgatctcaaggccgcggcccgcgtgtcgggcaacaagaaggccgatctgattccgatgaaggaactgctgcccgtgacgggttatatacgcggcggctgttcgccggtcggcatgaaaaagcgcttcccgacttatatccactcttcggccggggagcatccgttcatctatatcagcgccggcgtccggggcctgcaactgaaaatcgccccggcagagctgatagcattcgtcggggcgaccgtggctgagatcagccgggaagggtagtgtctgagtttaccgttccggccggggctttgcgcatttttcatatactgcggccgtttgttcggcgatagcgtcccagtcgtatttttccatcggatattccttttgccgatagggtgcgtcgatgttctgctggagcttctgcgccagcgcggctatgtcgccgacggggaaataagcctctttttcaagaccgacctccagattggccggaatgtcgcttacgatgacgggcagtctgtaactcatcgcttccagcaatgcgatcggaagcccttcgtgcgaagagggcagcacgaagcagcgggcgtgggtgagaagggcgtgcagctttttccccttgatgaagccggtcaggacgacgccctgttcccgtgcgtattttttgagtcctgcggagtactcgtcttcgaaatccgtatctccggccagcaccagtctgcaccccttgttgtcggtcttcgagaaggcttcgatcaggtggtgcaggttcttttccgggacgaagcggcacatgctgaagatgtatttccccttttcgacgcccgtttcttcgagatattccggaaaatcgacgatctggggagccggaaccccgttgtaaatcaggtgacactctttgcggtggtatttgcggatcagcatgtcgtttatgacgttcgaaatcacgatgatttcattggcgaagcgtgcgcccatcatttcacccagtctgagtaccgttttggccgccgcaccccatttgtcccggtcgtaatccggtccgtggtgggtaaataccaccttcagtcccagcaggcgtgcgaccggcgtcagcagcgccgggccgacggcgtggatgtggatgatctcggctttcagctttttggcttcgaggacggcccggaacgtatggacgatcgcttcgaacgacttctttttcggggttgcgagatcgacgagcgtgattccctcgtattgccgcagcgtgtcgtgcacgtagcttttccgccgtattacggttacgtcgaatcccttccgggcgatacgcggaaacagctcttcgcagtgcgtttccacgccgcccatgatgccgggaatcccacgggtgccggtgacgactattttcatagccggaaaacggtcattctttttggcattcacgacttggttagaatttttcccgcaaatcgccctgcatcgggtcttggccgacatcgcaccacttcttgtccagactggccggttttccccgcaggctgcggagcttgtttctgagcgcccacctcagcgggtatttcatgtatttgtgcattacaggactggccgtaccgaccatccagcagtttttcgggcatttccggaccatggcgcggacttcctgcgcccggtcgctctcccagatattcatgaagtcgggcgtttcgtggatattgcccatagatttctgccagtatttctcttcgagaccgttgcacggatacacctcgccgaaaggatcgatgaagaagttcgccgaacccgcttcgcacggcagcatgcggcggccgccttcgatgtagttgatcagccccatattgaaccatgcgcggaaccagcttttcggatggttctcctgcaactgccattcgatcagctgttcgaagtttttgcacacctcgtccttgttggtgattacgttgtcgtccttgtggaaataataggagttgtggaaagccgccgtagcgaactccatgcccaaggacagcgacagctgatagagcgagagcatatccttggaattgttgttcgatacggtgcagccgaatccgatgtctttcagccccatttgcttcagcgtgagcagtgttctcagccctttgtcgaagccgccggcatgtccgcgcagctcgtcgttcttgcagctcaggccttcgatcgagatgcggatgccgatgttcgggaattgtttggccaaggccacgactttgtcttcgaaccatccggacgtggagatgacgatgcggtccgtatgtttgtagcactcctccacgatctccgccagatcttcgcggacgaagggttctccgccggtcaggttgatgaatttcaggcgcggcagcgtacgaaggtccgcagctttgatttcgtcgtcttttttcgtggggttgaaccagatgttgcacatcttgcatttcatcggacagcgataggtcaggatgatgctggcgtcggtggggtgcgggatattttcagcagacatgattttgacagatttgtatgaatccaaggtttgaattatagattgtacagctgtatgagctgtttatagtatgtttccgaattatagcgctttttcgcttcgagggcgatggcggcatggtcgaacggtgcgtcatacatggcctgaattttggcggtcagatcgtccgtatccctgcttctgaaatacaaaccgttgaagtcctcctgaatcaattcgggaataccgccgatttgagcgcccagtaccggcgtgcccaagcattgggattcgatgacggaaagcggattgttctcatatgattcggacggaatgacgcaaaagcgggcctgactgacaattcgttttatttcattccactgcttgaatccggcgaattcgacatttggccccgcgagtttcttcatttcggcatccagcggacccttgccgatgattaccaatttgtaaggcagtcggttcgcggcgtcgatcagagtctttattcccttttcatgcgatatgcgcccgatgtagcagtagtaatcttttttcagataggctgcgtctgcacatttttcaacgtcgataaaattgcataatgtatgcagtttgcctctatcgaaaccgccttgtatcattttgtcggctaggaactgactggggcagataaatgaatcggtgcaggcctcaagcctttccctgttccatttccgggcttctttatacgccaatatactcaccagccacgagtttttcatgcatttgttctccaataccttgtgtttgtccgtgaaacatgcttcgcagatcgtttccccgttgcgcaggcaatcgtaccggggacatagcagtttcaggtcgtgcagcgtccatacgactttgatacctctccgatgggcgagttcggcgatcagaggggataattgcgtgtggatattgttcaggtgaacgacatccggctggaaatcatccagcaatgcgttgaatttccgttttacctctttcgaaccgaatggccgtctaaaggtttcaagtatgttgggacccggcgagaagcgtatttcgctcggaaaatatttgctccacggagtcgggaaattttccggatgttgcatggcgaataccgcagtatcgtgattgtggtctttaagcaactgttccagattcagcgtgcatacgcagtctccgccgcggcggtagtagaatttattggcgagcagaactttcataaaaaacgatcggaggtaagacggagagttttcaatttgcattttatatcggccgcaactatttccgtataggctcttgcaccgttgtcgttcaaatgcgatgaatcggcaaaatatgttttgttgtttgcgaagcgtttgtcgcttagataattatagtagggaatgctgtactttgcacatatgccttccacgatgtctggccagtcggcattgctcccgtattcgggcgatatgaatacgaacagggcggaatgtctttttacttcgcaaatgaattgctcaaaataacggattttgacaggatctgtttcgtttttctttgcggtggattttgacggctcgtaagtcatcgtatcgtataaaggcatgtagccgttatcggaagatacggctcgatccgatagattatccattagaatgctcaggaatttcgaattgaaccggtaggaattcgacatcattttccaacgttcggacggatttatgtcccagaataatgaatcgactcccggatattgataatacggccgcaagggagccaagtatttgcaattgtcgtttctaaacagatcgaatgtaggctggatgtccagtatgacgattttgggatagtaccgggccgtaatcgtttttagctttccatacccgtatatgatgccgttgccgtccattccgcagttatagcaactcatgtccaatgaatcggacaatatcgaagggacgtagtgatgagcggcccgcgacgagccgaaaatcaggatgtttgcatcgacttcgtcggatatgaaattatcccgttttgtatatccgccggttgcatggactgtcagataaccgaagattttgcccagaccgaagtcgagcagaccgcataacgcaagaaatatggccgatttgatcagaaaattccgcatgcgttagaagtttacataaatgaattgtccggaatccaatacgcctgtcagaaggattagaaacattagaaacagataggaactccacctgattgctatgtttctgttttcgaagaagagaaaccggcgtgggaagaattcgtcgcgcatgtctttaaaaaacaatatgcagacggcgacgagcatgtagatcatattgctgttgtttgataaaaacagggtagtcccgaaatccgtgaatattttgccgatgaccttgcatgcgtccgttatcgagggcatccggaaaaatatccatgcgaagttgacgataaggaatgtgatgataatacgaagccggcgattcccccccccttcatacttctgaagacgcaatgccttttcggctatttgcgcgactccgtgaataattccccatatgatgaatgtccaattcgcgccgtgccagattccggagaccagaaaagtcgcgaaaatattccaataggtgcgtaatttgctgcatctgctgccgcctagcggaatatatacgtaatcacggagccagatggacagcgaaatgtgccatcggtgccagaagtcggttatgctggttgcgaaataggggcggttgaagttattgatcagatcgaatcccaagactttggctactccgatagccattaacgaataacctgcaaagtctccgtatatttgcagcgaataacacaaactggcgacgaacagggagaaccccgtctgataggtgtaattgtcataaatgctgtctacgtacagacctaatcggtctgctaacacgacttttaggaacaagccccataacaacagtttcaacccctgtgtcgctttgtcggcatcgaaagttttgagacttttgatttgcggcagcaggtccttcgccttgctgataggccccgaagctatttgcggaaaaaatgaaatgaacagtgcatagtcccggaggttgcgttcgcagtcggtccgtctgtaatatacgtccgccagatatccgtatgcctgaaatgaaaagaaggatatgccgatgggagcggcccaatgcattgtatttatttcgatgcgcaggtggagggtcgtcaatatatcgtatacgatgccatttataaaattgtagtatttgaagaaaagcagcggcagcaaggtcaaaattcctgcgacggtcatttttagcttgttcttggggctgttgcgggatatataatgagcgccggtataggtcgtcagagttacccacaagaggatcaatgcgtatacgggcacccagttcatatagactgcatagcttatcagcaatagaagccagctgcgccattttatcggacagagataatatgcggcgaagattgtcgggaatgcaagtagaaatacaaatgaattgaacagcatgctgaggctctctagttaggcgttgcgtctgatatgtcggaaatggtattttactgtttttgaattgattttttatagatgtccgttaataattgggcggaatggatattcgttaggttttcccggtagccgatacaatttttgacataaaaggaattgttgtcgatgatttcttttagctcgtctactccccattgattcttggctattcccagcttattcgcttggatgtagccggctgaagccggttgagtgtttgtcagaatcggggtccctgaaacgatggattccggaatggaaaccatattcagatcttttcgcgtattgataagaaagcaaagagattctcggatatatttattcagtgtttgctgaggtaaaaatccaagaaatcggacactttccgagagttttaattccgacactaatttttttaaatttgcttcttcttcacctcgcccggctatcaacaatttaatgtcttcatatgcttccatttcatggaattgctggaaaatccgaattattccgtcgatattttttctgagaatcaattgggacgaactgattatttggcgttcttttttttcggaataggtgaatttatcgacattaattccatgatcaacgatttgctttactgtttgcggcatatatttgctaataaatttgtaagctggccctgagcggggagctactgctgcaatcctttgcatgaataaacgaacaatgacattatgccatattttcgatggaagtcgatggaatttgttttgatgatcggtcagttcttgccaaattatagttttttcgggacagattcttgctgctaataaagactggaacgaaaatacttcgctggagatcagcaaatcgaatgatttttcattttttttgatatatggccatagctcaggagaaaagggcaacatggccggcgggaaaattcgtttaaagtccgatttaaaaaaaagaatttcgaaatcatacgcttctttttccgcaggagcatactcttcggcggcggctaatgttacatcgtgtcccagtcgtttgaatcctagacacatgttgtaaatcatcgtgtcttttatggatttgacttgcggaattacattgttgtccgccgtaaaaaggatcggattcaatatcaataccttcatggcatcacatctgtttgttcgcaggggatgagtacagatttatatagtcttgttccaatatattctctgaatagaattctggatacagattcgcatttgtgctggcgctgccggaatccaatgcctgctgcagcttgtcggccagatcttcgacatttccggctttgaagaacagcgagtcccggttggcgtattctttgaaaaaaggcacgtctgacatcacgactttcttcctgaaatagaacgcaagggaaagcacgcccgacatggtggccgaacgatacggataaactacgattgcggctttggtgaatagatctcggacttcggcatcctcgatgaaccggttcagtcttatgatgtttggctcggttattttgtctaaattacccaaaccggcaatgactaatttatgtttgtcggattcggggtgtcgattgtaggcactgatcaatatgtctactcctttgtaatgatcgacagctccgaaaaataaaatatagtcggatgtattttttaattcagcaacagccatcgttcctttttttatttcttctgtaaccaatgtggggaagtgggtgaaaaaaatctgtttattcggatatttctcgcataatactgcatactgactttttgatgaagttgttaaatgaggtattatttcccggatattttttgtacaccaatataggtatttatgaaatatataactgcaaaatcccttgtctttagattcatggggatataaatcgtgaattgtgtaataaaatttttctttttgtggattgaataataaatatgtgaacagactgaagtctcctgttaataggtgtacagcatctattttctgagatttagtgattctttttatttctcgaataattcttatcggatagaatttgtatattaatttgagaatttttgtcttcgggtattcgatgtgtcttatttttcggtttactatgacactcttgctgaatgacctgtttggcgaatttacaacaatagcaaacacttcgaatttttcactgttggacaatgtgttaattattgaagacgcgtatgggatcattcccggagcaaattcggtcgctattaataaaattcgcttcatctaactgtgtatggtaatttacagccgtgatattctggactgatttttcgatatttctgagcgttggcggactgcctgtaatacaattcataaagataaaaaagtaacccatggaagaagaaggaacctactcgatagaattctacggtagtgaaacttgacagcagcagaaaaatatagaaaaatttcaaaaagagaatgttgtcgtcgcattttcttctgatgatccgaaagacggggaagagaagggccaatacggtcggaattccgatcatccagctcagtccgacgatcccccagtcatgccatccgttatatggacctaatgcaggatcgacagtatagaacggctgaccgtattttgttctggggttggggattccgcttccgaatacatattcgacgggggatttgaaatgctcttttgtaaaatagttgaactggatgactcgtatgtaatcctcattggcgaatgtggcgcccgcttcctgccgcttcatcatgttgtttatggagttctgaacgaccgaagtttgggagagaacacctatgacaataaggaagagaaacatatattttacactggcgattttctttaccgagtaggtaaataggcccaatgccaataatatggcagccatctgggttctgaatcctgctataaaaaggacgaagaacgcgggcagtatgtataacaggtatttggtcttgcctgaaaataaatatttcccgtaaaaatagaatagacagatataggcgatcagttgtccgtacatggtaaatcgtccgatgtccatatagtccgttgccaaattgaatattttgtcgggatatatcagttggattgtgaagcagcatagaaaaataacgtaggcgattgctaatgccttttctatctcttttatagaatatttgccggataagaaaacaaaataagacagaattgtgaaaaattgcaggcaggcaattgagctgaatgttttgagtaggctttgctgttcgtaatatgagcttgaaaatccgctgattatgaaaaagatgaaatatatgatcaggtgtttcttaaacattccggattgcctttccagaatggcttttatcatgtagaacaacgcgagaatcaccggaagcaaaacaaactgaggagtgagtaatccccagcaacatgaaaaaagcaatatccagattatgagtttgttgacattcgaaatcatcggcggtttgcacttaggtcgttgaacagttcttcccaattgttgacaatctcttctacgcagaacctgcggcaggagtgcaggcccttcattgccagtttttcccgaagggaggtgtctgtcatcagctctttcattttgtttacatagcccgtaaggtcttcattggaaacgatgatgccgttgtatccggtttcgacgatgtcgtgcagcgacaggtaggaatccattacaaccggaacgacaccgcattgttgtgcttcgaccaatgtcatgggaaacccttcgaaggcagaggtcatcatgaaaatggcggcctgcttgtaatagggctgcggatttcggaagccttcgaacgaaatccgttttaatcctaacgcctccgccagttgtttatacatggccaaatccggtccttcgccgacaatccggaagttccactcgtccaagcggggatcgttttcaatagcgcgccatattttgattgcccgcgttatgcgtttctggatttccaccatccgacctacgagaagaacggtcttctctttcgactgcaaatcttcgggccgcatttcgttcgggtaaaccagcggattggggatggcacccaactggctatttgtatttttatagttggcaaattgctcgtactgacgttgaaaggctggagacaggaaaatatatttatccgtatgcggtaggaactttgtcacctgcctgcaactatgtctctttttccagaatttatacagcgaagtgcatctttttttcaggaatccgtttattcccgttccctcgatcattggggtataaagtgcctgatggagacatgtgatgatctttgtcttataccgtccccttattccacggatatattcgaccggccaccattgattgacaagataatggatgtcgttttcctgaatatattctttcagatagccggttactttgtcggcatcgggaaagcgtgtcgtaaactcgtcgcagcggatatcgggtatttgaacggcctttatggctggatcgatgaaaggcaggtcggcccgcgtattgtttttaaaatacaagacggatacattccatcctcgctttatcatttcgttggcaaggcagatcgttacggtttctccgccgccgtatacgggccacagacgtagcagaaaggttatattcatcagtcggattttattgttcgtctcttgcagtaagcgcattttcgaggaagcacatggattttgaacgcatttcttccagtttcgcatttatgggcttccagtctatggattgtcttatggggcaactctccaatccgtttgaatcggatagggttctgttctctatcttgaacagcttcaacagcgactcgaatcgtgcgacgcctctgtttctgttgacgtataatacgaacggtttgttgaacagaatggaaaaaacgcagccgtgaaaggagtccgtgaaaatataatcggcataatacatcgccttcagccagtccgctacggatggcgctattcttttttcgagaggggccagtctgtcttcggtttccgtcgctgcaaagttgtagtccatggctaaaactttcgagacttttttcagcgccgccagtttgtcgtcggaacggtctaatatgaatgccgttattttgtttgcgtacttttcggcacctccttcgccgatgagtgctcgatagtccgcaggtgtcagaagcattgtcggatctaaaacatgttcagcggtatggttgagatgccttttgcataattccataccagaatcttcccgtacgctgactgcggtgaactcctttagcttctgggtgcagaatcgggtctctttcttcgaatatgcccatttgtcgataccgaatgacgccgcataggcaattaatttcgctgtacggccgtcgatcggggagaagtaataatctttgatttcctccatacaccctttgcgccatacctgatcagaacctacgatgtaggcgtcgcattttaagtcgcggatgcttttgtatgcactgctgttataatagaccggtgaaaagggttgcagccatttgtcgataaatggttgcgtgtgttgtgtaattacggggtattcgtcgtagattttcttgtcgtagaaaacgcaggcaggttttctgaatatgtattttttgacacttcgttttaagatgttccagccgttgaaccgcttttttttaacgagacggcgaatgagtatgacttcgtgcccttgccgcgtcaataccgttttcagcgcatatgcctgcaatatgctaccgtatcctgtttccaagggcaaggtcagcaagccgattcgcatatcttttgattttgtttattagtctcagttttttgctctgccggtgcagcgaagactttgcaaccgccttataaaaagtatctcttctcggatccttgataagactggcggtgatcatcggattttgtttgatgactttctcataggattgctccgaacgtaatgtgccggtaatatatttgctgccttgatccgtattgatcagcaacagacttataccgttgttgtcatccggaaagtccttggtgccgcggaatccccaaaaatcgccgagtgtgatgtcgctgccgcttttcagttcttttgccggacaggcgtagcatgaatatctttcggtcacatgcgacaggaagcagtaaaagaatggatctttatagtgtattctggacacgtctgccgtctccggaagaccggacccggtctctctgcggaatgagaaccgcaaactgtaatgctgccatccggtcgtcttgtccctgaaattgatgcccgtaatttgggatgtggaccgcaactcggaatttggatgtcggcccccccccgtcgctattatttcatgtaaatattgtcgccagatttcggggctgggaacaccgtggcaaactaaatctacagtcaatagattttcatattcttttgccaaaaaaagctttaaacctcttatttgacagggagtgcccgaaaagagcaccggacggccggattccagaaattcttttgcctgccggtaagtgcggccgatacggctttgcacatacttgctgccccgcatggccgcgagtccttcgagcgtttcggtacaggcgtgttctacagcccaattctcgtcgaaacgggcaccgaaaaccacgccgttcttctgaatgatctgttccgctatatgggtgaagatacctcccgaagaactttgcagccgaatccgagtctttgtgttttttgccgcatatacatggagcggcttccgcttttcgccctgattgagtaccggacatactttttcgcataggccgcaacctatacatttcgacgtgtctgtttgcggataaagaaatccttcctcgtcttcacgcattacgatgcaggacgtggggcagcgctgttcgcatgcagcgcagccgcagcacatctccttcgaagcaatggaaatcattttttgaattttgatgcgatggatgagactttcgagcagatatagattttctcgccgggcgtaagtccgaaccagtaaacggacatgcttgtcgatatggcgcaaatcaggcagatcgtcagaaggttccatattccttctcccggctgccagtatgccacggccagaggcgctgcaagcgcgattgccgtaactttggatatactccagatcactttggcaaagtattcccgcaatgacaaccgaatcattcgccgcagcatcagcagccgggcgaattgggctgtaatctccatgacaaaatgtacgataaagacgctgtatgcagggagcccgaaccgcaaacagagataggaaatcggtaggatcagcagcagcaaccctccgacgacactttggtatagtttgatcttgccggtggcggaagcggctgtaatcaacggattggagacggcatacacccatgtcgtgcataacatgatccgcaggaatacgactgtgtggtccgggacgattttcagccagagcgtcagtatcgcttttgtctcgataaggacgggaagcgataacagcagcagcaggaaaaatgaaaatttggcgctccggaaaatcaggccatgcatgtattccatgtcgccggtcgcgtatgatttggttatttgcgggttgagggccgtctggaagttgctgctgaattgaccgatggcggtttgggcctgcacggcgatacctctggcagcgttgacaaccggaccgaagaacatattcagcagcaggttcaacccctgtgtaaatgtgatggccgccagactgccgaacatattccaactggcaaatcctgtcatttccttgaataaccccttgtcccagctccagcgatattttgtttcgttgaaatgccggttgcaataccagctgtaacatagacgtatgaggaactggacaataacgattaacgcggcgtacaatatcagtttgtcggtgtgaaaataccgaaggaaacagacgatcagcaatttcaaagagacttcgataatcgatatataggcaaatgcgctcattctttcatgggcgatgatggccgcattatacggtacgctcatgatcatgatcaccgatgccgctaccgagcactggaatacccagaaagcggcattcatgcggtcggccggaatctgcattttgttccataagaaccaaagcccgaccgtttccgccagcactattatcagaaaggatatgatgccatgtattgaaaggctggtcgaaaaaacctttgtcagttgcgcccgattgttctgtcccagctcaaaggtcaggtaccgctgtgtcgcagaggtcatggatccgttgatgaatccgaacatggcgacgattccgcccacgacattgtagatgccgaagtcctccacccctagaatattcaataccacccggctggtgtagagacttaccgccatggtaacaagcatccggaagtagagcagaagcgtattctttgctattcgtttgttgttagagcttatttcctgcatttcggagccgatgttcatccgttaagcgccatatctacctctccttatacatgctctgatagtattgctggtactcgcctgaggttatgtcgtccatccacgattggttctggaggtaccagcggaccgtcttttcgatcccctcctcgaactgcaggctgggctgccagcccagctcgtctttgagtttgcgcgagtcgatggcgtatctcaggtcgtggcccgcgcggtcggcgacatacgtgatcagcttttccgaagcgccttcgggattgcccagcagccggtccacggttttgacgatcacccgtatcaggtcgatgttcttccattcgttgaaacccccgatgttgtacgtgtcggcgaccttgcccttgtggaagatcacgtcgatggcccgcgcgtggtcctcgacgtagagccagtcgcggacgttctccccgcggccgtacacgggcagcggccttcggtggcggatgttgttgatgaacagcggaatcagcttctccgggaactggtagggcccgtagttgttcgagcagttcgtaaccagcgtcggcatgccgtacgtgtcgtggtaggcccgcacgaagtggtccgacgaagccttcgacgccgagtaggggctgtgcgggtcgtacttcgtctcctcggtgaagaactcctccccgaaaggaccgccgccgctctcgcagcccgcagggtcccccgcggggcgggtcagctccagcgcaccgtacacttcgtcggtcgagatgtggtagaacagcttgcccgcccaattgccgttccaatgctcccgcgcagcttcgagcagcgacagcgtgcccatgacgttcgtacgcgcgaaggtgaacggatccctgatcgagcggtccacgtggctctcggctgcgaggtggatcaccccgtcgatgccgtactgccggaacagttcacgcatcgcctcgaagtcgcagatgtcgcccctgacgaaagtgtagttcggccgctcctcgatgtctcgaaggttggcgaggttgccagcataggtcagcttgtcgaggttgacgatccggtaatcggggtatttggtcacgaaaagacggaccacatgcgagccgatgaagcccgcgccgcccgtgatgaggatagtgcgttgcatagtgattggattattcggcgagttgtttcaggcagtagatcattgcctccctccagtgggggatgtccatctggaaggtggtcttgatcttggttttgtccagcaccgagtaggccgggcgtgcggccttggtcgggaattccgacgtgtggcaggggatgatgtggcatgagtcgtgacccgcagccgcggcgatctccgtcgcgaagtcgtaccacgagcagacgccctcgtcggtgaagtggtacacgccctcgttgcccgcgtagcgttccgactcgatgatcgagaagatcgcaagcgccaagtccccggcgtaggtcggagtgccgatctggtcgaagaccacctgcagcgtatcccgctccgaagtcagacgcagcatcgtcttcaggaagttgtgtccgtactccgaatagagccacgccgtgcggaagatcagataccggcacccagatgccatgacggcgcgttcgcccgcaagcttcgtacgcccgtaggctcccagcggcgagggagccgtatcctccctgtagggcgtatgggccgtgccgtcgaagacgtagtccgtcgagacgtggaacagcgtcgcgcccgtcgccttggccgccgccgcgagattgcccgcagccttgtggttcagcaggtccgcacgcggttcgtcctcctcggcccgctccacgtcggtgtaggccgcgcagtttacgataacgtcgatgcgccgctcctcgaccgttcgcaggacggcagccgcatcggtgatgtctagttccgcgacatccgtacagaagtagttgtggggcgagacgccgccaagacgccgcagggcgctgccaagctgaccgttcgcgcccgtaatcaggatattaagcataatagtcttcgttatagtcgaacagttccccggcctccgacagcagcgggtgggcgctgtccttgggcgagaggacgacatcttcgggggccagacgccagtcgatgcccagcgacgggtcgttccatgcaatggcgccctccgattcgggggcgtaggggttgtcgcacttgtactggaacgtcgcttcgtcgctcagcacggcgaagccgtgcgcgaagccccgcgggatgaagaactgacgcttgttgtcttccgtcagctccaccgccacgtggcggccgaacgtgggggagccacggcggatatccaccgcgacgtcgagcacgcggccccggaccacgcggaccagtttcgactgggagtaccgccctttctggaaatggaggccccgcagcacgccgtagcgtgagtgcgattcgttgtcctgcacgaagcgcacgggacggacctgtgcgtcgaagcggcgctgcgagtagctctcgaagaagtaaccccgcgcgtcgccgaaaacctccggctctagaataaccacgccctctatggcggttgtcagaactttcatgggattatttttcgtcgaggagtttcaaaaggtattgtccgtactggttcctgagcatcggctcggcaagtgcgcgcagcttgtccgccgtgatccacccgttgcggtaggcgatgccttccagacaggcgatcttaagtccctgacgcttctcgatgacctccacgaagatcgaggcctcggccaaggagtcgtgcgtgcccgtatccagccacgcgaagccgcgctggagcgtctgcaccttcagctcgccgctttgcaggaaacactggttcacgctcgtgatctcaagctccccgcgggccgagggacggatgcccttggccacatccacgaccttgttcggatagaagtacaggcccacgactgcgtagttagacttcggatgggcgggtttctcctcgatcgaaaggcagttgccctcatcgtcgaactccgcgaccccgtagcggcccggatcgtcgacgcggtagccgaagaccgtggccttgccatcctcctcggccgtacggacggcctcgcgaagaagacccgtgaaaccggaaccgtagaagatgttgtcgccaagaacgaggcacgcggaatcgccgccgaggaaatcctcgccgatcagaaaagcctgtgcaagaccgtccggagatggctgtgccgcgtagtcgatacgcacgccgtagtcggagccgtcgcccagcagacgccggaaacccggaaggtcctccggagtcgagatcacgaggatttcgcggatgcccgctagaagaagcgccgagagcgggtaatagaccatcggcttgtcgtagaccggaagcagctgcttgctgaccccctttgtgatcgggtacagccgactgccgctgccgcccgccaaaatgatgcctttcattattcaagtgaattaatatgcgttttcatcccgcttcagcgcattccacaccgtcaggagcatgatgcgtatatccagcagcagcgaccagttttcgagataccagatgtcgcggcgcacgcggccctccatctggctcaactcgtgggtctcgccgcggtatcccgtcacctgcgcccagcctgtgatgccgggcttgatcaggtggcgcaccatgtatttattgaccagcttggagtaaagctcggtgtgctggagcatgtggggacggggaccgacgatcgacatctcgcctttcagcacgttgatgaactggggaagctcgtcgatgctcgatttgcgcaggaagctgccgaaacgggtcttgcgcggatcgttcttcgtcgcctgcacccggtcggcctcgtcgtttacgcgcatcgaccggaacttgatgcagccgaacgtgcggccgttttcgccgctgcgctcctgaatgaagaataccgggcctttcgaagtcagcttgatgcccaaggccacgaagagatagacgaaggggaagagcgtgcagaggaagacgccggataccgtgacgtcgaacgcgcgtttgacgaagcggttcgaaacctgccgcagcggctcttcgcggatatagaggatcggtacgttgcccagcagttcgaggttcatcgcgcgtttcatgtagttgcgcaggttgggcacatagtagaaccgcacgaaattgttttcgcagtagtccatgatcgggaatatctcttccagatagcggtcggtggagaggcagcagtacacctcgttgaccgggtggcgtttcagccacggcagggcttcgtctacgctgcccagacacggggtgttgccgggcagggccttgtcgtcgtggttgctgaaaaaaccgagtacgcggtagccggtgctgctgttgtccaccatttcgtgatacacctccagcgcattgtccttgctgccgacgatgatgacccgccgcgagttgcgtccgtgtccgcgggtgatcttgaccgccatgcggcagatgtagcgccacagcatcagcgcgacggtgagcgatatgtagaaggcgccggtcagccggagcggcagcaggccgtaactccacacggtctgtatcagtgtgaagaatccgatgtggcagagtacgacgtaaaacacgcggcgtatgatctcctcgtagggaacgatccgcgaggagaggatcacgccgaaccatgaaagtccggggatgaagcagatgttgagacaggcgaatatctccagcgagtgggcgacgtatgccggctggggaaacagcgtcagcgcgaatatccaagaaagattgagtagaaatagatcaccgataattacaggaagcttgatcagcagggattcctgcatgacttgtttcataaatcgaaaatttagaggcgttaatttccgtattgaacgtatgtcggattacgtatggatataaaatgaattgctaatctatctttgcgatgtatttcagcggaatataggccgtcagggcggttgcgacgttgcggatcgccacggcgaccttgctgtgtcccttgtggcggatgtagcggccttcgattcctgcgaacatgccctccgtgacgcgtaccggatctcccttttccagatccacgtcctgcggcgcgacgatttcgacgtgctcgttctgcgtggcgacgacggccatgaagtcctgcatctgccgctccggaatcaccgtcggcgatttgctttcgcggtccatgatgtagcggatcggcagggtggtggtcgcttttatctcccgcagccggtcggccgacgtccggatgaacagcaggttgtggatcagcggttcccagaccttgcgtcttttgccgccgtaggtccgttcggcgaagtgcatgggtacgtagctctcgatcccgatactgtccagatagctctttgcggccatttcccggctgtacgtgacgcggattgcgtaccattgctgttcgttttgcggctcttcacacatgggcacaccttggggacacctccgcagacggagtgcggttgtcagtcgttttgattcggtttgttgaaaaaacttgctcgcgtgcattcctacccataggacctgcacatcctttcgtccggtgcaaatataagcaattttccccatacggcaacatcgccgcaggtcgattccgtttgcagcctaaacaataaagggcacaaaaaggtccggaaattccggattcgcgcctctttatgtcctttgtcgtaccggcacgcaccaaacggtgcatatcggttttcctttcggacgcaaagttaatcttttatttttaattggcaataaacggacgattttttttgatttttaggcgaaagaagacttcttcgccggcccggcggcctgttcggcgtattcgcggccgccgccgggtgacgggcgccggtctgccgcccttgccgtgccgatgcggcgggccgtacggcgctgcgtccgcacttccctgcgcggcctgcggcgcattatcggaacagggtgaacctttcgttccactgggcgcgtatcgtgtcgtaataatagcgccacggggacgtccgcaggacgcggcgcagccgccagcggttgtgtatggggctgaacagcttgaaatagagcttgggcagcgtccgggtcggcatggggcgcatggcgtatatttcccgcatgaaacgctccagcatgcctgcatcgcagtccggctccggaacttctgcgcccagataccggacggcggcggccgtcatcagcgcttcgaaacggtccagccggtagtcggccagcgccttgtggaacagttgccggtcgatttcatggccgtgccgctccagaaagcaggcccagtcgcagagatgccggacggcgattccctccttctggtagtgtacggccgcgtggcggagcaggtatatcgcgttgaaggttgccggcgggacggcgatgttttcgccgatttcgcacacgccctcctgctccagcactgccgtcagcagggcgttcagttcccgttcgttccggttgcgccggacattgagaatggtccggtgattttcgatcagaatgccgtcccacgtatgggacgaatgtttcggaacgtcgaaatagggctgcgcccccatttgcagcagcaggcggtcgccttcgtcggaggccccgaacaggtagatgtcgatgtcgccgcactcacgatgcgccggaacggggtagtccctgctcagccccagccccttcagtacgagcatgcggatgccgttttcggcgaaggctgccgccatcttcgcggtcttttcctgctggcggcggtagcgtttctcctgcctttcggccgtcaaggcccagcggagccgaatatcccgcggcggccgtagcttttcgggcagacgctccatgccgtctccgatcaccgcgcatacgccctgatcggccgccatgcggaagatgtcgtcccattgccgtgctgagattttcccggtgacagccggagcgcagtccggtttcagcccgctgcgcagcagctgaaagaagtggcgggtatcgttttccgaatacataagatgcttttgagtgttgcggtggtgtagtgtcgttgccgtgcaaagatagcggatttccgcaaatattcaagatcttgccgaacggccggagttttgcggagcggggcaaatgaaaaaacgtcccgaatgattcaggacgtttcgccgagtttcggactcttttctgtgatcccgctggggctcgaacccaggaccccaacattaaaagtgttgtgctctaccagctgagctacggaatctccgataccaagaggggtgtttcccgtttttggtggtgcaaatgtatagaatatttttgttttaccaaaataaaacgatatttttgtaggcgtttaagtgaaaaaattcaattctaaactcatattacctatgtgtaaagcgttaattatcggtgccggaggcgtcggaacggtcgtaacccaaaaaatcgccgccaatcccgtttttacggacgtgatgctggccagccgtaccaaatccaagtgcgacgccgttgcggcggctatcggcggcggccgtgtcaagaccgcgcaggtcgatgccgacaatgtggccgaattgtgcgaactcttccgcgcgttccgtcccgacatcgtggtcaacgtggccctgccttatcaggacctgacgatcatggacgcctgccttgaatgcggctgcaactacctcgacacggccaattacgagcccaaggacgaggcgcatttcgaatattcgtggcagtgggcctatcaggaccgcttcaaggccgcggggctgacggcgatcctcggctgcggcttcgatccgggcgttacggccatcttcacggcctatgccgccaagcaccatttcgacgagattcattacctcgatatcgtggactgcaacgccggcaatcacggcatggctttcgccacgaacttcaaccccgaaatcaacatccgcgaggtgacgcagaagggccgctattacgaaaacggcgaatgggtcgtcaccgagccgcacgaaatccaccgtccgctcaactatcccggcatcggcgagcgcgaatcctacgtgatctaccacgaggagcttgaatcgctcgtcaagaactatccgaccatcaagcgcgcccgtttctggatgaccttcggtcaggagtacctcacgcacctgcgcgtgattcagaatatcggcatggcgcgtatcgatccgatcatctacaacggcgtcgagatcgtcccgatccagttcctcaaggcggtgctgcccgatcccaagtcgctcggcgccaactaccacggccagacctcgatcggctgccgcatccggggcgtcaaggacggcaaggaacgcacctattatatctataacaactgcgaccacgagcaggctttcaaggagaccggcacgcaggccgtcagcttcaccacgggcgttcccgcggcgctcggcgcgtcgatgtgggccaagggcctttggcgcggcgccggcgtcttcaacgtcgaggagttcgatcccgatccgttcttggccgagctgggcgagcaggggctgccgtggcacgagcttttcgataccgatatcgagctttgatccgcagacccgtttccgatattccccgcaaggtgcgacaatccgcaaagcgcgaacagacgattctgtttgcgcttttttcatacccggcagcggcccctccccggcgcagatttccgccgggttttgtattcagatcgtggcccgtcctgctggggctgaagattatctcggtgtgcacagccgaccgcgtcgtggtcgtcgatagatattgaaccggggcgcgctccgctatgccgaatcgcggtccgatacctccgccgcaggtccgcgctttttccggagggagatttttccggctgagtatgtataatatatgatacaattttattatctttggctgtcaattaacccacttgatagttatgaaaatgaaatgtatcctatgtacgttaggcgcgcttgtgatgtgcacggcgccggttttcgcacaagctgcgaataagcaagagaaatcggaattcaacccgcactggtttatgcaggtgcaggccggagcgtcctatacgctcggcgaagggcctttcggcaaactcgtatcgcccgccgcggcattgtcggccgggtatcagttctcgcccgtctgggggctgcgtttcggcctgagcggctggcagagcaagggcgcatgggtgtcgccccaaactacctatcagtataaatacctgcagggcaatgtcgaagccacgctcgatctggccaaccttttcggccgcttcaatccccgccggacggtcaatcccttcctgttcgccggtgtcggcctgaacggagcgttcgacaacgacgaggccaacgccctgaacgacagcggctatcggctgggcaacatctggtccggaagcaaagtgttcgttgcgggccgtctgggtctcggcgtgaatttccgcttgtcggactgtgtgctgtttggggtggagatgaatgccaacatgctctccgacaagtacaactcgaagaaggccggcaacctcgactggcagttcaacgcgctgggcggcttcacgttccgcttcggcaagaaccataagaaagcccgcacggcggcggtcgttcccgctccggccccggcccctgcgccggaacccgctcccgctcccgtcgaggagaaacccgcggtgaaggagacgcctgctccggctcctgcggccgttgccgagcgaccggccgagctgcgtgaaaacatcttcttccggatcggctcgtcgcagatccgcaccaccgaagaggccaaggtcggcgcgctggtcgagtacctgaaggccaatcccgaagcgaatgtcgaaatcctcggctatgccgatgctgcgaccggttcgcatgccgtcaatctgaaaatttccaagctgcgcgccgagagcgtcgccgccgccctgaagaaggccggtatcgccgcctcccgcatcagcgccgagggcaggggagacaccgcccagccgttccccggcgtcgagaaaaaccgcgtcagcatctgtatcgcgaagtaggggactgcacccttaccggcttgtagcggctgtctgacgactccccgaaattgaaaatcacccctgtcagaacaaattctgacgggggtgaaatcgtaagaataggacttgttggacagcccggcggccggtttcacatcatctcccttatcggcctgtgtgcttcccgcattcctgttccgatttgccgcgtgccgtccgacggctaagtataaatacctatttgatggcaattcacaccctgagccgtgcggttttagcagggaaattgctatttttgcaactgttttgaaataaaacgactcgatgattgacttcttgaaactgccttctccgtgttacgtcctcgacgaagagttgctggaccgtaatctggcgataatcgaccgtgtgcgccgcgaatcgggcgctgaaattatcgtggctctgaaggcctgcgccatgtggagcatctttcccgaactggcccgccacagcgacggcgcgacggcctcttccgccgccgaagcgcgtcttgttttcgaggagttcggccgccccgcccatacctacgccccggtctataccgaccgcaatatcgaagagatacttcgctgcagcgaccatatcaccttcaattccgtcgcccagttcgagcgtttcggaccgatggccctgctgcgcggcatttcgtgcggactgcgtatcaatccccagtattcgcccgtcgagaccgacctctacaacccctgcgttccgggttcgcgtctgggcgttacggccgacctcctgaaggagctgccggcgggaatcgacggtctgcatttccacgtgctctgcgagtcgcgtccgcaccacctgcggctggcgctcgaagccgtcgaaaaacacttcgaccaatacctcgaccggatcaaatggctcaatatgggcggcggccacctgatgacgcacgccgagtacgactgcgacgagctgatcgcgctgctccgggagttcaaggcccgccatccgcacttgcggctgatcctcgaaccgggcagtgcatttacttggcgcacaggctatctggtgtcgacaattgaagacttggtcgagaacgccggcgtgcataccgccatgctcgacgtgtcgttcgcctgccatatgcccgactgcctcgaaatgccctacaaaccggcgattgtcggggcgcacgaacccgccgaaggcgagaagcgctggcgcatgggcggcacgagctgtcttgcgggcgactattacggcgactgggccttcgaccatgagctgaaagtgggcgagcgcatcgttttcgaagatatgatccactatacgatggtcaaaaccacgatgttcaacggcgtggcgcatcccgccatcgtcatcgcccgccgcgacggccgcatcgacgtcgtccgcgaattcggctacgaggacttcaggaaccgcatgtcgtaaataacacaaacacaaataaatgaaagattttacacctactccctacacgcttgagtgcgtcgccacggggcgcgaattcgaagatacgggctggatgcttgccgatccgcagtgcaagacgccgtcgctcgtgcgcgccaagtacgcccgcaggcagctcgaagtgaaacccgacgaatacggtttctacaaattctgcgactggcttcccgtccgccgcatgctcaaaggctcttcggcgcccgtcacctacaagagcaaggggcttgcccggcacctcggacttgagaacctctacataaccttcaacggctactatccggccatcggcgccacgatgtccacctgctcgttcaaggagaccgaagctttctcggtctgcgcgcgtgccgccgaggacgaagagcgcgtgctggtggtggcctcggccggcaatacggcccgcgccttcgccaaggtatgctccgacaaccacatcaaactgctgttgtcggtgccttacgacaatatcgaggccctctggttcgagcatccgctcaacccctgcgtaaaactcatttcgtgcgagaagggcggcgactatttcgacgccatccacctgagcgacatcgcccttaagggccccggcttctatgccgagggcggtgcgaagaacatcgcccgccgcgacggcatggccacgacggttctttcggccgtgacgaccatcggccgcattcccgactactattttcaggccgtgggcagcggtacgggagccatcgccgcatgggaagccaacatgcgcctgatcgaggacggccgcttcggttcgaacaccatgaaactcatggtgtcgcagaatgcgcccttcgtgccgatgtacgacgcatggcaggccggttcgcgcaagatgctggcctacgaggatgacaaggcgcgccgcgatgcggagatcatcgacgccaaagtactctcgaaccgccgtccgccgtacggcattacgggcggtctgtacgacgcgctgaaggctaccggcggcgaattcttcgtcgccaccaacgccatggcccgcaaggcccgcaaactcttcaaggagctggagggcgtcgatatctactcggcgtcgggcgtcgcgctcgcgtcgcttgtcaatgcggtcgccgcgggcaagatcgagaaggacgccgtcgtcatgctcaacatcacgggcggcggcgaggagcatttcaaggaggacaaggagctgtggtacctcaagccgagccacgttttcccgctcgaacccgacacggacgacgtggtcgccaaggtcgaggcgctgtttgcgaaaaacattgcagaatagtacgatacatagattgtctgcaccttcggttgcagcggtcgccgattggttccggggagaaaattctccccggaattttttttgcagggtttcctcggcgggagtgcgctcccgtttctccggacctttttcgaaccggcaggggatgcggcccttcccggctcgcgcctttcccgatgccggcagctgccggtgcggcgtgcttcccgcggctcgccgctttgcgccggcgctgacggccgtaaacgcggatgcggacctacccgcccatgccgctcagccggcggccgggagcgcataagcgcgcaatgttgaaaaagaaatggctgcaaaagtcggaaagctgccggaaaaagttacctttgcagcggtttgaaaagcgggggcgcagccggacccgctttccgaccgctgtaaattattttatcaacccaacaaaaaacaagatgaaaaacatccaagcaaagcagactccctgcttcaggcgttggagccgcaaaggctggtcggcctttgcgagcctgcaccgccatgtaaccatcggagtcctcgccgcgacgatgtcgatcctcttgctcgcgacgcaaagtgcgtctgcgcagcatgccgacacggccgccgtcctccgtacgctgaggatcgacgaggtcggcatatcgggcagccagactgccccgacgcgcaacgtacagtcgcaaaccccgcttttcgaccggaaagcacaggccgcagcgcccgtccagactctggagtccgccctgcgcctcgcaccttcggttgatatccgcgaacgcgggggcaagggcatgcaggccgacatcttcattcggggaggctctttcgaccagacgatggtccttctcaacggcattgattttacggacgcccgcaccgggcaccagtcccactcgcttccggtcgatctcgactgcatttcggccgtcgatctgctggacggcgtgccgggcgtcggggcctacgccggggcggtcaatatccgcacggctcccctcaggccgacctacctgcgtttcgagggtacgggcggccagcatggctacgcctatgccaacctttcgggcgccgtgactgcgggccgcttctcgctgctcgccgcaggttcctaccgccgcagcgacggctaccggcacaacaccgatttcaccaacggcaacgccttcctgcgtgcgacctacgagacgcggcggctcggattcttcgatttccaagccggctggcagaaccgcggcttcggctccaacggtttctatgcggcctacaatcccgaccagtgggagggcacctccacttcgctggcgtcgctgcggtggctcaggcaggccggacgcttctcgctgggggcctcggcgagctaccgcaagaatttcgaccgctacgactggacgcgcggcacagtgatgaaccgccataataccgacaatgcgggcgcgcggctctggaccgacttcgattgggccggcggtacgacctcgctcggcggcgactatgccttcaaccatatctacagcaccaatctcggtgaaaagctctccgtaccgcacggccattacacgcatgccaaggcccgccatacgggcaacgtctggctgcgtcacgccaagcagtggcggcgcttcgatgcggccgcttcggccggcgtcagcctgacgccttacggcacttcggcgttgtggaacgtttcgggcggttggcgacccgctgcgggactgcatctggcagtcggggcgtcgcagtcgatgcgtctgcctaccttcaccgatctctattactcctcgccggcgcagatcaacaacctcgacctgattccggaaaaggctgtgacataccgcattgaagccgattatgtaaagggccgctggaacgcttcgctgcgcacctactaccgtgccggacgcgacatcatcgactgggtgtggcgcgaggatatggacggcaagtggcactccgagcagaccagccgtctcgatacctacggtgtcgagctgacgggcggctatgccgccgccgaaggtttcctgcggcgtgcgacgctctcttacggctacatcacgaccgaccgcaatacggaggtcgtcgcccgcagcgccatggacttcatgaagcacaaggctgcattggccgtcgaagtgcgtttcctgcgccgcatgtcgctggcgctgaccgcttcggtttacgaccgcaacggcagttatacggactatccgacgccgggcgacgcttccgtttctcaggtgcgcgactacgaaccctatttcctgctcgacggccgtctgtcgtggggaaaaggcgtctgccggctctatgtcgatgccacgaacatcaccgatactcgttactgcgatctgggcggcatccgcctgcccggcgcatgggtcacgggcggcgtggtgctgaccatcggccgctgacctctctccggccgcgctcccgcccgccgcataaggcgcgggaacccggtcgctctcctttttccggctgcaatcctgcccgtcgcctcgtgcggcgggcttttttgtcgccgggcggctttccccggcgggaccctccttcggcggttttctccggcggctgcggacgcccgcttttgtacgataattccccgatggtgtcatttcagcatgtgaacctccttttttccttacgaatttttcagttttgtccgggtttttcttatctttgaaaagaagaatcaatataaccgcacaacatatggaaaagcgtatcgtggaatgcgtccccaacttcagcgagggacgcgacaaggcagtaatcggccggatcgtatcggccatcgaaacctccgggggcgtcaaagtgctggacgtcgatcccggcgaagcgaccaaccgcaccgttgtcacgttcgtcggctcgcccgaagccgtcgtcgaagcggctttcgcgggggtgaaaaaggccgccgagctgatcgacatgcgcaaacacaagggggcgcatccgcgcatgggcgctacggacgtgctgccgctgatcccgatcgcgggcatcacgctcgaagagtgcgccgaactggcccgcaaactggccgagcgtatcgccggggaactgcatgtcccgacctattgttacgaagccgcggcgtttacgccccggcgacgcaatctggccgtctgccgcgaaggggaatacgaggcgctgcccgaaaagctggcgcacgaggagtcggcgcccgatttcggggcgcgtccgttcgacgagggggtagcccgcacgggcgccacgaccgtcggtgcgcgcgatttcctgatcgccgtgaatttcaacctcaataccacctccacgcgccgcgccaacgccatcgccttcgacgtgcgcgaaaagggccgtcccgtccgcgagggcaatccgatcacgggcaaggtggtcagggatgccgacggcaatcctctgatgcggccgggtacgctccgggcgaccaaggctatcggctggtttatcgaggagtacggcatcgcgcaggtttcgatgaacatcaccgacatcgccgtaacgccgctacatgtcgctttcgacgaggtgtgccgcaaggccgatgcccgcggcgtgcgcgtgacgggcaccgaaatcgtggggctggtgccgaaacgcgccctgctggaagcggggcggtatttcctccgcaaacaacagcgttcggcgggcatcgccgaggaggagatcgtccgcatcgccgtcaagtcgatggggctggacgacctgaaacccttcgatcccaaggaaaaagtgatcgaatacctgcttgaagcggaggatcagaagaagcggcttatcgacatgacctgcaaagggttcgctgaggagacggcgagcgaatcgcccgctccgggcggcggttccatcgcggcctatatgggcgcgctgggcgcggccctcggcacgatggtagccaacctctcgtcgcacaaggcgggctgggacgaccgctgggaggagttctccggctgggccgagaaggggcaggcgttgctgcgcgagctgctgcatctggtggacgaagacactgcggcgttcaaccgcatcatggacgttttcgccatgcccaaatcgaccgacgaggagaaggcggcccgcagtgcggctttgcaggcggcgacgctctacgccacgcaggttccgctgcggacgatgaaaacggcgttcgaggtctttgcgatcgtgcgcgccatggccgccgaaggcaatcccaattcggtctccgatgcgggcgtcggcgcgcttgcggcccgcagcgcggtgctgggggcgtgtctcaacgtcaagatcaatgccgccggcctgaaagaccgggccgcggccgacgcgctcgtcgctgaggcgaacgccgttgccgccgccgccgaacgggccgagcgcgaagtgctggaaatcgtagaacgtaaaatctgaaccatatgacactgcaagagttccaaaacgatatttgtgcgggtattcccgaccggctgcccgccgcgaaaccttatgacaggcaaatcaaccacgctcccaagcgcaaggagattctgacgcctgaggagcaggtgctggcgatcaaaaacgccctgcgttactttcccgccaaacaccacgccctgctggccaaggagtttgccgaggagctgcgcaaatacgggcgtatttatatgtaccgcctgcgtcccgattacgagatgtacgcccgaccgatcgaccaatacccctgcaagtgccgtcaggccgcggcgatcatgctgatgatccagaacaacctcgacaaggccgtggcccagcatccgcacgagctgatcacctacggcggcaacggcgcggtattccagaactgggcgcagtaccgcctgacgatgaaatacctctcggagatgaccgacagccagacgctggcgatgtattcgggccatccgctggggctgttcccgtcgcaccccgacgctccgcgcgtggtggtgaccaacggcatggtgattcccaactactcgaaacccgacgactgggagcgcatgaacgccctcggcgtgtcgcagtacggacagatgaccgcgggttcctatatgtatatcgggccgcagggcatcgttcacgggacgacgatcacggtgatgaacgccgcccgcaaacgcttcaccgccgatcgccgcgacgctcgcggcatgctcttcgtctcgtcgggactgggcggcatgtcgggcgcgcagcccaaggcggggaccatttcgggcgtggtgagcgtcatcgccgagatcaaccccaaggcggcgcagaagcgttacgagcagggctgggtcgatgaactgcaccattcgctcgacgagctgattccccgcatccgccgggcctgccgggagcgcgaagcggtttcgatggcctatgtgggcaatgtcgtggacctttgggagcggctcgccgccgaagagattccggtggatctgggttccgatcagacttcgctgcataatccgtgggcgggcggctattatccggtggacgtgagctacgaggcttcgaacaagatgatggccgaggagcctgcccgtttccgcgaatgcgtgcaggagtcgctgcgccgtcaggtcgatgcgatcaataagctgacggctcgcggcatgtacttcttcgattacggaaacgccttcctgctggaggcttcgcgcgccggagccgccgtgatgggcgagggcggccggttccgttatccctcctacgtgcaggacatcatgggaccgatgttcttcgactacggcttcggacctttccgctgggtctgcacgtcgggaaaacccgaagacctcgaacttaccgaccgcctcgcggccgaagtgctggaggagatccgccgcacggctcccgccgaaatcgcgggccagctcgacgacaacatccactggatccgcgaagcgggccgcaatcggctcgtcatcggttcgcaggcccgtatcctctatgcggacagcgaaggccgcacgaaaatcgcgcaggctttcaaccgggccatcgccgacggacgccttacggctcccgtggtgctgggccgcgaccaccacgacgtttcgggcaccgattcgccctaccgcgagacctcgaacatctacgacgggtcgaaccttacggccgacatggccgtgcagaacgtcatcggcggctcgttccgcggtgcaacgtgggtctcgatccacaacggcggcggcgtaggctggggcgaggtgataaacggcggcttcggcatggtgatcgacggttcggaagcttccgaccgccgcatccgcgaaatgctgctgtgggacgtgaacaacggcatcgcccgccgcagctgggcgcgcaacgagggggctgtgtcggcgatccggcgcgagatggagcgcacgcccggcctgcaggtgacgctgcccaatgccgccgacgaagaaatgatacgcaatgtcttgaaagaaaacgaataaacaaggattacctcatatggaacatcatcttatctccgcgcagcatctttcgatcgaccgcatccgcgaaatcctcttccgccgtctgccgctggccctgagcgacgatgcccgcgcacgcatcgtccgctgccgcgaatacctcgaccgcaagatggaaaaccccgaacgcccggtttacggcatcaccaccggtttcggatcgttgtgcgacatttcggtagggtatgacgagctggcccagctgcagaagaacctcgtcatgtcgcacgcctgcgggacgggcgagcgcgtcccctccgagatcgtgaaactgatccttctgctcaagatacagtcgctctcctacggccattccggcgtgcagctggcgaccgtggagcggctgatcgactttttcaacaacgacgtactgcccgtggtctatcagcaggggtcgctcggcgcttcgggcgacttggcgccgctggcgcatatgagcctgccgctgctgggactgggcgaagtggagtgcgaaggccgtgtccggcctgccgccgaggtgctggccgagcggggctggcagccgatccggctcgaatccaaggaggggctggccctgctcaacggcacccagttcatgagcgcatacggcgtctggtcgctgatcggggcgcgccgcctgagcgagtgggccgaccgcatcggcgcgctgtcgctcgacgctttcgacggccgcatcgaacccttctgcgacgaggtgcatctgatccgcgcgcacaagggccagctcaccacggcccgcaacatccgccgtctgctcgaaggcagcgagctgatcgcccgtccgaagaagcatgtgcaggatccctactccttccgctgcatcccgcaggtgcacggggcgtcgaaagacacgatcgactatgtggagggcgtgctgacgaccgaaatcaacagcaccaccgacaatccgacggtcttccccgaagaggatatggtcgtctcggcgggcaatttccacggtcagcccatcgcgctggcgatggactttctggccatcgcgctcgcggagttgggcagcatctccgaacgccgcacctacaaactgatctccggtgcgcgcgagttgccggccttcctcgtcgccaagccggggctgaacagcggcttcatgattccccagtacacggcggcctcgatcgtcagccagtcgaaggggctctgcatgcctgcgtcggtcgattcgatcccctcgtcgcaggggcaggaggaccatgtgagcatggggtccaacgccgcgaccaaactctaccgcgtggtgtgcaacaccgaacgggtgctggccatcgagcttttcaacgccgcgcaggcgctcgaattccgccgtccggcgcgctcgtcggagacgctcgaacgtctcgtcgccgaataccgcaaagaggtgcccttcatcgacaacgattcggtgatgtacccgcatatcgaatcatccatccgattcatccgcaaatcatgagacttctggtaaagaacatcggcaaaatcgtcggtatcgagaccgccggacggcttcggctctgcggcggggagatggaccgcttggagacgctcgacgatgcgtggctgctggccgacgacggccggatcgccgcattcgggcgcatggagacgctcggtgaaatggccgcggacaggaccgttgacgccgaagggggcatgctcttcccatcgttctgcgactcccacacgcatctggtctatgccggaagccgcgaacgggagtttctcgacaagatcaacggcctgagctacgaggagatagcccgccgcggcgggggcatcctcaattcggccgacctgctgcacgaaacttcggaagaggagctctacgcgcaggcgatggagcgcgtgcgcgagatcgccgcgaagggaacgggctgcgtcgagatcaagagcggctacggcctgacgaccgaagacgagctgaagatgctgcgcgtcatccgccgcatccgcgagacggctccgctggccgtgcgcgccacgttcctcggcgcgcatgccgtacctcggagctatatcggccggcaggaggagtacgtggagctggtctgcaacgaaatgcttccagccgtggcggccgggaaactggccgatttcgtcgatgtcttctgcgacgaagggttctttaccgtggaacagacggcccgcatcatgaaagccggacgcaagctgggcatgcagccgaagattcacgccaacgaactggccgtttcgggcggcgtgcaggtgggcgtggagtacgacgccctctcggtcgatcacctcgaacgcatgggcgaagcggagattcgggcgctgcgcggcgcggtgacctctccgacgatgctgcccggcgcggcgttcttcctcggcatgagctatccgccggcccgcgagatgatccgcgcggggctgggcgtggcgctggcttcggactacaatcccggctcgtcgccttcgggcgatatgcgcatggtcgtatcgctggcctgcatccgcatgaagatgaccccggccgaagcgatcaacgccgcgacgctcaacggcgcctacgccatgggcctgagccgcagctacggttccgttactgtaggtaaagtcgccaatttcttcatcaccaaaccgataccttcggtcgaattcttgccttatgcctatacgacgccgctcatccgccgggtattcctgcgcggcgaggagtatgtggcgtagtttttgacccggagggattcgtatgcgattattgattttaacaatcggtctcctgctgtcgggagccgtaaacggacagaatatgaaaccgctgacaccggaagagcgacgtgtgatcgtcgacaagggtaccgaagcaccctttacgggccgatattatgaccaccgcgaggcgggcgtataccactgccgccaatgcggcgcgccgctgtaccgttccgccgacaagttcgacgcggggtgcggctggcccagtttcgacgacgagattccgggcgccgtgacgcggacgcccgacgccgacggacggcgcaccgagatcacctgcgccaaatgcggggctcacttgggacatgtgtttgtcggcgaggaatttacaccgaagaatacgcgccactgcgtcaattcggtttcgcttctcttcgaacccgaagcgaaagccggcgaacagccggccgccggaggggagcaggcgcagaaaaaggaggggcccgaaaccgcgattttcgccggaggctgtttctggggcgtggagtacctgctgtccaagatgcccggcgtgctgaaggtcgaatcgggctacaccggcggcaggaccgaaaaccccacctacgagcaggtgtgcagccataccacggggcatgccgaagcggtgcgcgtgacgttcgatccggcgaaggtgtcgtatgaaaagctggcgaagttctttttcgagattcacgatccgacgcagctcgacgggcagggcccggatctcggcgaccaataccgttccgagattttctatacgacgcccgcccagcagcagacggccgaaaagctgatcggcgagctgcgccgcagagggtacgacgtcgtgaccgaggttacccctgcaggccggttctggcccgccgaagattatcaccagcagtattacaagcgcaagggtacgcttccgtactgccacgcctataccaaacggttttagccggcctgccgctgcgtcggccggccgggaagaaagccggcgcgttttacaggccggagaagactctatgtccgatccggtgtgaaaaccgcggccgggttgccggaaaataaggctctccgcttcacagcggggagccttgtcgtatatgcaggccggactgcgaaccttctgagttcccgaaaaccgtcgttgttgtatgatcgcgtcggatcgcccggcgaaccatacggctctgcttgctctcgaaccgtatgcaggatgtcggccgggaattctcctgcggaatttatccgcagtgccgtctcgcctgccagatcacaccagcttgtcgatttcgccccgcatgatgcggggcaggtttgcgcggatcttttcgaccggccagttccaccattgcagctccagcagccgtgcggccgctctgtcgtcgaaacgcggccgtatcgttttggccgggacgccgcccacgatcgtgtagggcggaacgtcccgtgtgacgacggcccgcgccgcgatcacggcgccgtcgccgatcctgacgcccgccatgatgaccgcttcgtaaccgatccatacgtcgttgccgatgatgatgtcgcccttgttgtcccacgccgcggcgacgttcgcccggtcgagttcccactcctcgaagaagagcggaaaggtgtaattggccagcgagccgagcgtgtggttcgcgctgttgaacaggaaccgcgcgccgcaggcgatggtgcagaatttgccgatgaccagccggtccttgttgatcgggtagtggtagaggacgttgttcttttcgaactctgtcgggtcgttcacgaaatcgttgtagatcgtgtagtcgccgacctcgatacaggggttgtcaatcaccgtattcagatagatcgtccggcggtcgttcgtgcggggatatgttttcgtattcatcgtgtgtttcgttgcgccgcctttgccgggccgccgcatttcctgcaaaattgcgaaaaaatccccgcaaaccggcggtccggcgacgaaatatttccgttgcaggaatttgccgcagtatcttggcaggaaaggagctgcgcggaatgcggcttccggcggcaattcctgcatcgggggagtatcaaccggggatatattttctacatttgcagccgtaaatccgttttatggaacgtgcaaaaggtattctctatgcggcgctgtcgtcgtccaccttcggattggcgccgctcttcacgctgctgctgctcgccgggggctattcgccgttcgaggcgctgtcctaccgctggggcgtcgcggcgttgtttccgggtgcactggccgtgtgttcgggacggagtttccggctgggacgccgcgaattggtcaccgtcttcctgctgagcctttttcgcgccgccacgtcgctgagccttatcatcgcctatcagcatatcgccagcggcgtcgcatcgaccatttatttcatgtatccgctcgccgtggctctcgccatgatgtgtttcttccgcgagaaaggctctgcgtgggttttcgccgctatcggcatgtccgtcgtcggcgcggtgctgctctcgctggggaatgtcgatttcacggtggaaaatagcgcgctcggcatggtttcggcctgcgtttcggtcttttcatacggcggctatattgtcggcgtgcgcaagagccgggccgtggagatcgactcggcggtgctgacttgctatgtcatggggctggggggcgctctattttatcctcggcggcctgctgacgggcggcgtccggatcgaaaccgacggcatgacgtggctctgcatcctcggtctcgcgcttcccgccacggccctctccaacatgacgctggtgcaggcgatcaagcgtatcgggccgacgctgacttcgatcgcccgaatcgcccgtgccctgcgcgaccataccgcgaagtgcatgctcggatttatcgaccattatcgtcatattcgcggtgcgctgggtgagttgggcgtcgggccgctgcgccgggacgagatcgaagtcatggcgcaatcgttcgtccggacgctggaaccgtacccggttgcgctggaaacctgcaccgtgaaggtcgatctgcgtcatctggggattccgtccggaatgtgcatcgaccgcgggctggtcgagcggatcgccggttatcccatagctgcgaaaaaagacaaaaaccaacggcaggtgtgcaactgcatcgaaagcatcgacgtcggcacgtacgaaacctgcctgaacggttgcgcctactgctatgcgatcaaaggcaactacaacacggcggaatacaaccgccgcaggcacgatcccgactccccgctgatgatcggccgggtgggcggggatgacgtgatcagggagcgcgaaataaagagcctgcggtgcgaacggcggctgccgttttagcgcgccggaacctcttccgcttcgtgtcgtttcgatattttgccccgaagctgttcgtaggtgcagttcaggatttcatagcggtcgattgccttggtttcgcggttggtctgaaccagatagcagcggcgtccccaagcttcgatcgtgtaattgcacttctccgattcgcggaccatcgagtgtccgtccatcaggttccagaaaatgtgcctcagtacattggcgtagcctgcgaaagacatctgctgtccgcgcaggtctttgaaatagacgtcgttgaagttttctcttgcccgtcccataatcgttcggttttaagtttcggcaaagatacgcggcgggaatgacaggttttgacacgctgccgattgtcgtcgcaaatatcgccataccgccttttagctatttccgcaattcgagcaccttccgcagccgttcgagttcttcggcgagcagcgtgcgcgggcaggcgatattcagccggatgaagcctgcgcccgccgcaccgtacatcgtgcccgaattgacgcgcagtctgccctcggcgagcagacgttccgccagttcgtccgacgccagtcccgcggcccggcagtccgcccacaccagataggtgccttccagcggcagtacggggtactgcggcaggtgctgtgcgaagtactcccgcaggaaaaggtagttggcgtgcaggtattcgttcagcgcgtcgagccactccgcgccccggtcgtaggcggcgatcagcgcgtcgatcgccaacggaccgatttcgcccgtttcgttgatgcgtaacgccttttcgatttttgcgcgcaccgtttcgccggccgcgatgatattggcgacctgcagtccggcgaggttgaacgccttgctgggcgagcagcaggtgaccgaattgtgcaggaactcttcgccgagcgatgcgaacggcgtgtagcggaatcccggcatgaccagctcgcagtgaatttcgtcggccacgacgaagacgccgttgcgcagacatatttcgccgatcctgcgcagctcctccggcgaccagacacgcccggccggattgtgcgggttgcacagcagcatcgctttgacctcaggatcggctgccttgcgctccagatcggcgaagtcgatcgtataggcgccgccgcggtaggtcaggtcgttttctgccgtccggcatccgctgttgcggatcgagatgaagaagtggttgtagacgggcgtctgaaccagaatcttgtcgcccggttgcgtcaaggctttcagaatggccgaaagcgccggaatcacacccgtcgtatggagtatccactccggctccgtgtgccagccgtgacgccgttcgaaccacttcacgaccgcatcgtaataggcctgcggcgcctgcgcatagccgaatatgccgtgctcgacccgccgccgcagcgcttcgacgacgggcggcgccgtacggaaatccatgtcggccacccacatgggcagtatgtcgggatcgctgtccagctcccatttgaccgagtgcgtcccgcggcgcgggactatttcgtcgaaatcgtatttcatcgtcgcatgttcttcgttgttatataatacgtcgtgccgcccgccgatgtttcagcggggcgggggatttttgcggcggggcgctattcctcccggtagacctcgccccgcagggcgtcgtcggagtagacgtgcaggctgtggcccgtgtcgctcaggcaggtgatgcggtgtatgtggttgtcgaaacgccccggcgcccctacggcgaagaatgcgcaaggcccctccacgacggcgctctccgtcagccgcgccgcacctccggccgcaggttcgaatatttcgagccggaaggtgccgtcggcaatgtgatagcccgcgaattggggatgcgcatggatgctggtccggttgccgtttttccagctcatcacgatcgcctcccagccggtggcggggcagcgtccgaggtaggtgcgccggtatgccgtgtcggaatagtcgtcgaacgcggtcaggggatgcgtttgcagccagccgaggacatacgcccgaatctgctgtccgagggcgtcgtctatcgtttttgcggcggtcgtctccagcaggccggagaagaaatccccgaagcccgcggctgcggcggaacattcgggcaggttgtcggcgagtgtcgtctttttcataatccgtgtgaaatccgatatgttgcaaaaatagcggaaatagggcgggccgcctacagcaaaaatacttatttcccgtccggcggcgccgagaccggaacctgcgggggcagggcggttccgccgccgcggcctccctgcggccgttctattccctgcgcaggcaaaaaagcaaactttttcatgcaataatcacttctgacagacagcgagttatgaatctgtgcggttttcttttttcgaaaaatccccgaaagcatttgccgattaaaaaaattacactatctttgcactcgcaataaccggaatggtgcgttagttcagctggttagaatacgtgcctgtcacgcacggggtcaggggttcgagtcccctacgcaccgcaccgctccgggagccgaagagcgaataaaatccggctcatacataaccatggtgcgttagttcagctggttagaatacgtgcctgtcacgcacggggtcaggggttcgagtcccctacgcaccgccagccgaccggggtcggcaaatgaaaaacctgcaactccaagttgcaggttttttcgtatgcaggggtgccgggcggaagatagggcggatttttgcgggcagctcccgtatgcggggatgttgccgatttttccgttgtcccgccggcggggcgtatgaaatcgcttgtctgcaagtatgttgggacgtgtcggccgccggggagccggatttttccgctaaaaggggcgatgcccgatacctgttttgcccgatacctgttttgcccgtgccgccaagagggccggacagctgcgggggctggcgccgaatcccggtcccgacgcttagggtttccggaagaaggagaactgcacgctcccgtagctcctttgctgccagaattccggatatgcggagaagtccatctgcttcgaatgttcgaaaatcagcacgccttcggggcgcagcaggtcgttttcgagcaccagccttacgacctgctcgctgcccgccagatcgtagggggcgtccgagaaaatcacgtcgaactgtttcggacagcttttgaggtagaggaagacgttggctttgaccgcatagaggttcccgatgcccagctgcgccgccgtctggcggatgaagttgtagtgtaccggattgatttccaccgaggttacgctccgcgctccgcgcgatgcgaactcatagctgatcgagccggttcccgcgaagaggtccagcacgtcgcactcctcgaaatccagcagattgccgaggacgttgaagaggttctccttggcgaaatcggtcgtcggccgcgcccgcaggttgcggggcgggttgatggcccggcccttgtattttccgcttactattcgcatacgatctgtctgaaatatccgccgagcttccgtttcaacgcccggccgtcgccgcttccgatgcgaagcgtgtaatccctgagccggaattcgcttccgagccgttcgagcatgtatagcaggtcggcctcgtcgggggcgggtacgacctccgcaaaacgcagtttgccgtcgtatacctttatatataacagtcccgcggcgtaatacatccacacggtcggaacgcttgtctgcggtacacagagcagcggggtggtgtagcgcgcacggccgccgaggcgttcatgcaccgcagccagcgcattttccgccgcggccatgacggcgacggcattctgctgcggcgcgctccatacggggcactctccgggcagtgcggccatgccggcggcggccagcagttccccggcgcacgcttcgtcgaaaaactcctccggcacgagcgtcgtccggggcgtcagcagttcgacctccacgagaccgtcgcccggaaactccccggacagcgcaggcgccgaaaaagagtgtccatccaacgttagctgaatggacaccttgtttatggattgcggagtgttactcccagttgcctgcttcattgttggctgcctccattgaaccgaacttgacaccggcgtagcggttgaagttgttctcctcgtcgtcgatcaggttgatgatctcctgacggtaagccaccgtgtcgaggaacattttgtacggcgcgcggcactccacgatgggcaccgtcacgttcgatgcgacggcagagccggcctccatgatgaactgagcctgcttgtcggtggtggggatataccgcaggtcctctacatcctgacgcgaaaggcgtttgggcgagaagatggtgtcgataacggcgaccgtgaatttctcgacgttctttttgttcatcttcttcagcatggccatggccaccgagtcgtcctcgtcgacaatcttacgctcaagctccagagagtcgttcaggataaacgatgcgagtgtatcgaagctgcccgtaaagcgctggtacttcgacttgaacgcgcgctgcgcagtacggatgtccttgatgcggtcgatgacctgggctttcttggccttcatctcctgctcgaaacggatcggggtagaaatctggtcgtagataacgtagaccagcgccacgataactacagcaagaatgatttgagcgatttttttcattttttaagctaatctaatatttgtttgtaattttgtacaaaataaaccgacgcatgtttagcacacgtattgcgacccaaatttacgctaaaatttgttttgaaacaacttctgggcaaaaaaaaattatagaaaagttgtccgaatatctcgcagacgacgatttttcccggatttttgtcctgaacgggtatgcgggtacgggcaaaacgactctgatcgcggcgctggtcggtgcgcttaaggatttgaatatcaaacccgttctgctggctccgacgggccgggccgccaaggtgctggcccaatacgctcaggaaaaggcacttaccatccacaagcggatttaccgtcagcggaccaacgccgattatgaatcgaaatattcgctcaacatcaacaccgaaaagggggccgttttcatcgtggacgaggcttcgatgctgtcagacactccgggcgacggggcgctgttcggttccggatcgctgctggaggacctcgtgcagtatgtccgcagcggccgcgcgtgccgtctgattttggtcggcgacagcgcccagctgccgcccgtgggggccgattgcagcccggcgctcgacccgtcggtgctggcccgcttcggcgacgtggagtacggtacgatggacgaggtcgtgcgtcaggaggccgagtcgggcattctgttcaacgccacgctggtgcgctgcatgctcgaaaacggcatctacgagattccgcacttcgaaacggactatcccgacatcgaggcggtcgaaggcggggagtttctcgacaaactgcaggattgctacgccaagtacggccgcgacgaaaccatcgtcatcacccgctcgaacaagcgcgccaaccgttataacgaaggtatccgccgcaacgtgacgttcgccgaggaggagatcgaaagcaacgacatgctgatggtggtgaagaacaactactattttacggagcggaacaaggattgccccatgcacttcatcgccaacggcgacatcgcgcggctcaagcggctgcggcgctacgaggatttctacggcttccgttttgcggacgtcgtgctcgaattccccgattacgaggatgccgagttggagtgcaagatcctgctcgacaccatcgcttcggaatccccgtcgcttacgcgcgaggagtccacgcgccttttctacgaggtcgagaaggattacctcgatgtgaaaagcaaactgaaacgcttcaaggaaatacgtgaaaatccgcacttcaacgcccttcaggtgaagttttcctacgccgtgacctgccacaaggcgcagggcggacagtggcgggcggtcttcgtcgaccgctgcctgttcggcgacgagccgatgacgcgcgacatgctgcgctggctctatacggccctgacgcgtgccacggataaattgtatcttgtaaatttcgatgaaaaattctatgaatagcgaactccatccgctcgaaccgtttcttcccgccaacgcccgcatcctgatgctgggcagtttcccgcccaagcgcatccgctggtcgatggacttcttctatcccaacctgcagaacgacatgtggcgcatcgtgggctacctcgccgcgggggacaagtcgcacttcctgatgcccggcgggcggaagttcgacaaggagcgcatcgaggcgttctgccgcgagcgggggattgcgctgtacgatacggcggtcgaagtcatccgactgaaagacaatgcgtcggacaattttcttcaagtggtgcgcgaggtcgatctggcggctttgctggcgcgtattccccactgccgcaccctcgttacgacggggcagaaggcgaccgatacgctgcgcgccattacgggctgcggcgaacctgcggtgggcgaaagcgtagccttcgaatatgccgggcgcagcatgcggctctggcgcatgccgtcgtcgtcgagggcctatccgcgcccggtcgagtggaaggcaggattttaccgcaaagtattcgaagataatgaaattctgtaatatacggtgcgccttcgtagcagataacccgaaaataatttcccgtttaggcttggcgggaccgttaaattccgttatctttgtgtgaaaataacatacaattttttattgtgaacgcagagaagaaaatagaaaaaaaatatgtcgagacccccctgatgaagcaatattactccatcaaggcggtgcatcccgacgctatcctgcttttccgggtcggcgacttttacgagacgttcggcgaggacgcgatcaaggccagcggcattctgggcatcacgctcacacggcgcgccaacggctcggccacctatgtcgagctggccggatttccctaccacgccatcgacacctacctgcccaaactggtgcgggcgggcgaacgtgtcgccatctgcgaacagctggaggatcccaagcaggtcagaggactggtcaagcgcggcgttatcgagctggtgacgccgggcgtggtgctgggcgacaatattctggccaacaaggagaacgcctttctggcgtcggtctatttcggccgtcagaccacgggcgtggcgttcctcgacatctcgacgggcgagttctacgtggccgaaggttcggagagttacatcgacaaactcatctccaacctcgcgcccaaggaggtcatctaccagcgcggctacgaagatcgtttttccgacgctttcgggtcgaaactctatacttaccgcctcgacgaatgggttttctccgaggaggtgaaccgcgaaaagctctgcaagcagttcggcacccgctcgctcaagggattcggcgtcgatcacttcaccagcggtctctcggccgccggggcgattctctactacctcgaattcaccgagcaccgtgacatcgcgcacatcacctccatatcgcgtatcgatcaggaggattacgtctgggtcgataagttcacgatccgcaacctcgaactcttctcgtcgaacggcgcccgcgagaagtgcagtttcgccgacgtcatcgaccgtacgctgacgccgatgggcggccgtctgctgaaacggtggatcgccatgccgatcaaggaccccgtgaagatcggggagcggctggacgtggtcgagaaattcgtccgggacgccgatctggccgacgtcgtgcgcgagcaggtggcgctggtgggggatatggagcgtatcgcttcgcgcatcgccgcggcgcgcgtcacgccccgcgagctggtgcagctgaaaaactcgcttttcgccgtcgagctgctcaaggccgcgctcgaatcgaccgacgacgcgcagctgcacgcactggccggacagatcgacctgctggaaggggtgcgcgaccgcatcgcccgcgagatctatcccgatccgctcaacaaccagattcagaagggcggcgtgatcgccgacggcgtggaccccgaactggacgatctgcgccgcatcgccctccacggcaaggactatctggcccgcatccagcagcgcgagagcgaagcgacgggcattccttcgctgaaaatcagctacaacaacgtcttcggctactatatcgaggtgcgcaacgcccataaggagaaggtgccggagacgtggatccgcaagcagacgctggccaatgccgaacgctatatcaccgaggagctgaaggagtacgaagagaagatcctcggcgccgaggagaagatgctcgtcatcgaacagcgcatctatgccgacatcatcgaccacataagccgctcgctgtcgcatctcctgcgcgatgcggccgtcgtagcccgtatcgactgcctgcagtctttcgcccgtctggcctgcgaacgccgttacgtgcgtcccgtgctggacgacggcaagctcatcgacattcgtcagggacgccatccggtgatcgagaccctgctgcccgtgggcgaggagtatgttcccaacgacgtgatgctcgacgacaaggagcagcagatcatgatgatcacgggtcccaacatgtcgggtaagtcggccctgctgcggcagacggcgctgattatcctcatggcgcagatggggtcgttcgtacccgccaagtcggcccatatcggcgtcgtggacaagatcttcacccgcgtcggagcttcggacaacatttcgcagggcgaatcgaccttcatggtcgagatgctcgaatcggccagcatcctcaataacatatcggaccgcagcatcgtcctgctggacgagatcggccgcggcacgagcacctacgacggcatttcgatcgcatgggccatggtcgagtacctgcacaaccatccgtcggcgcatgccaagacgcttttcgccacgcactaccacgaattgaacgagatggagcagatgtgtccgcgcgtaaagaacttccacgtgagcgtcaaggagatgggcaaccagatcgtcttcctgcgcaagctcgaaaggggcggcacggaacactcgttcggtatccacgtcgcccgcatggccggcatgccggtgtcggtggtgtcgcgcgccgacgaaatcctgcgcaacctcgaactggtctacggcaacaacgaaatcgtgcccagccggagcatcaagaaccggggcaagaaaccttcgccttcggtcaaggaagctgccgaaaacggagcgccgcagaacatgcagctgtcgatgttccagctcgacgaccccgtattggtgcagatccgcgaccagatcaagggactcgacatcaactccctgaccccgatcgaagcgctcaacaagcttaacgaaatcaagaagataaccgggatataggctggcgtcgtttattccggttcgaccggtttcgcgaccagcctgccgcacggtccctgaaatcgtgctgcgccgctccgtgtgagattttcccttccgtgcgaaatctctctttttgcggccgtgccggcgcagcgtcaaatataaatcccgaatctcgccggagattcgggatttgtaatgaaacagggaaggggtactccgtgctattcgttgcgtgcgatcagcgaactgatgttctgaatcagcatcgctacggccaccgagttgaagccgccttcgggaatgatgacgtcggcgtatttcttcgaaggttcgacgaactcctcgtgcatcggcttcacggtcgaggtgtactgcgtgatgaccgactgcatcgtacgtccgcgctcgcagacgtcgcgcaggatgcgccgcgcaaggcggatatcggcatccgtatcgacgtataccttgatgtccatcagatcgcgcagctccttgttctcgaagatcaggatgccgtccacgatgattaccttcgaaggctttacgctcacggtctccgtcatgcggttgtgctcgacgaacgaatagaccggatgttcgatcggaacgttctccttgagcgccttgatgtggtccaccagcatctgggtgtcgaatgcctgcgggtggtcgtagttgagcttcgtgcgctcctcgtaagtcagttccggatgcgccttgtagtagtaatcgtggcagagcgttacgacgtcgtcgccctcgaaagcctcctgcagacgcttgacgagggtcgattttcctgagccggttcctccggcgactccgataacggtaactttcatagtgtcggccaattagtgcggttatataaagaaaaggatcgcacctttcgcaagggcaatcctcttcctgatttcgattatgcgtcgatgttcgcgtaatgtgcgttcttctcgatgaactcgcggcggggcggcacttcgtcgcccatcagcatcgagaagatacggtccgcttcggcggcgttctcgatattgacctgacgcagaatgcgcgtgtcggggttcatcgtcgtgtcccacaactgatgggcgttcatctcgccgagacctttgtagcgctgtatgtgcacgcccttgccgaattcggccgagatggtatcgcgctccttctcggtccagcagtagcgctcctgcttgccctttttcaccagatagaggggcggggtggcgatgtagacgtggccgttctcgatcagctccttcatcttgcggaaaaagaacgtcagcatcagcgttgcgatgtggcttccgtcgacgtcggcatcggtcatgatgatgatcttgtcgtagcggagtttctccaggttgagcgccttgctgtcctcttcggtgccgatcgtcacgcccagcgccgtgaacatgttcttgatctcctcgttctcccacatgcgatgctcctgcgctttctcgatgttcaggatcttaccgcgcagcggcatgatggcttggaagttgcggtcgcggcccgatttggccgtgccgcctgccgagtcaccctcgacgaagaagatttcggcgatcgaacggtcgcggctcgtacagtcggccagtttgccgggaagtcccgcgcccgaaagcacggtcttgcgctgtaccatttcgcgggcgtggcgtgccgcatggcgtgccgtggcggccagaatgaccttctgcacgatggccttggcatccttgggattctcctccagatagtggcccagcgccgaggacatcgcctgatcgacggcggccgaaacctcgtcgttgcccagcttggtcttggtctggccctcgaactgcggctcctgcaccttcaccgaaaccacggccgtgagaccctcgcggaagtcgtcgccgttgatgtcgaacttcagcttcgagagcatgcccgaatcctcggcgtacttcttgagcgtacgggtcagcgcacggcggaagcccgtcaggtgcgtaccgccttcgatggtgttgatgttatttacataggagtgtacgttctccgagaaggaatcgttgtactgcatggccacctccaccgggacgccgttcttctcggtgtcgaggtagatgatctggtcgatgatcggcgtgccgcgcgtggcgtcgagatactgcacgaactccttgagaccctcttccgagtagaagttgtcgtggacgtattcgccgttctcgtccttgctgcgcttgtccgtcaggttcaggtggattcccttgttcaggaacgccagctcgcgcagacggttggccagaatttcgtatttgtattcggtcgtgagcgtgaagatgctgccgtcgggcttgaaggtgatggtggtgccccggtcggtgcactcgccgaccacctcgacctgcgaggtgggcgcgcccttgctgtagctctggcggtaaatcttgccgtcgcggctgtgaatctccgcgatgagcagggtcgaaagcgcgttcacgcacgatacgcccacgccgtgcagaccgcccgaaaccttgtagctgcccttgtcgaacttgccgccggcatggagcacggtcagcaccacttcgagcgccgatttgccctcctttttgtggtagtcggtcgggatgccgcggccgttgtcgcgtacggtgatggaattatcttcgttgatcgtcacgtcgatgtcggtacagtagccggccagcgcctcgtcgatcgagttgtcgactacctcatagaccagatggtgcagacccttctcaccaatgtcgccgatatacatggcggggcgcttgcgcaccgcttcgaggccctcaaggacctgaatattcgacgcggaatattcttcttcttgcttttttacgttttctaattcggtactcatctgttgtctttaaaatatcgtacaaatatacgaaatatttccggataatccaatagcccaaattcccaagatcagcccaattccgccttgaggtccacttcgcggattttgccctgcgagaagaggatggcgcgggccggatggttctctatgagggcggtgttgtgcgtggacatcaccacggcgcagccgcggcaggcgatctcctcgaaaagctgcatgatgccctcggccgtcacggggtcgaggttgccggtaggctcgtcggccagcagcacctgcgggtcgttgagcagggcgcgggcgatcaccagacgctgctgctccccgcccgaaagctcgaagggcattttgtagcttttggcccccagatcgaccagattcagcacctgatcgatccgctcgcggatttcgctctcgtgtttccagcccgtggccttcatcacgtaatagaggttcatgaagacgttgcggtcggtcagcagctggtaattctgaaacacgatgccgattctgcggcgcaggtaggggatgtcgcgccgtttgagccttcgcaggtcgaagccggccacgcggccttcgcccgtgagcagctgcacttcggcgtacagcgttttgagcagggtgcttttcccgctcccgacgcggccgagcagataaacgaattcgcccggcgcgacgcacaaattcacatcggacagcaccatctcgccccgttggagcaatttggcttcggacgtgctgccgaacggattgtccgcataataaatagccgcgtttttcagtcttacaacgtatttttcactcatagggccgctctttggaattatttttcaaagatagtcaaaatattcgttccgaaaagttcccggaacgaaaaaaaatacctccgctgggcctcggtccggtttcggagaggcgtttgcggatgtttttgtttaatgaatcagccgtttgttttcataaaataaccgcaataatttgcatatccgccccggcatgcctacttttgtatagacgtgccgggagattccggcctgacagtgacgctaaaatttatcgaatgaaagaatacgaaatcctgcaggagatcatgcgggatgccaagataggttggtggcaggccgaccgcaaacgtcgtatgttccacatatcggaagggcttcgcgatctgctggggctttcgacgtgcgacgtgagttacgaagagtttcgggatatgataaacccgacctaccgggagtatgccttcgcttcggtcggggtgcgcgggggagatttcggaaacgaacacctttatccgctgcgggggcctaaaggcgaaatctggtgttaccggaaactgctgcgtgaggagacggccgaggacggcggaatgctgctgacgggatatttcagggtgaccgatcccccgcaggaggccaattcgcccgaaaagcagcagatcaacgacctgctgtaccggctcaacagcatttcgcatacgctgctgtcgctgctgaaaaccaacgatctggatgtcgtcatcgacaagatactcaccgacgtgcagaccatgttccacggcggccgggcctatatcatcgaattcgaccgcgagcgcaggacgcacgactgcacatacgaggttacggccgagaacgtcacggccgagcaggatttggtaaacagcctgtcgatggacgaggtgccgtggtggacccggcgtatcgagaacggcaatcccatcatcatctcctcgctcgacgaactgcccgacgaagcgttccgcgaaaaggaggtgctcgccatgcaggacatcaaatcgctgatcgccgtaccgctcgcctcgcgcgacaaggtgtggggatacgccggcatcgacatcgtgaacgaaccccggacgtggagcggggaggattaccagtggttcgcgtcgctgatgaacattatcagcctttgtatcgaactccagcgctccgaacgggaggcgcagtccgagcggacctatctcgaaggcctttaccgccacatgccgctgggttacgcccggctgcagatgctgcgcgacgacgccggcgagccggtcgatttcaggattctggatgcgaattatgccgccgacaagatttcgggcgtgttccgggagcagtatataggcaaacgcgcctccgagctgggactcgacacgcgcttctacatgccgattttcctgcaggtgttcgacagcggcgattacatcgaacatgacagtttcgacgagaaatcgaaacactggatacattcgattctctatacgacccacgagaacgaggtgatctgtctcttttccgacacgacggacgtgcacaacgcccacgaagcgcttttcaacagcgaaaagctgctgcgcaacatcttcgacaacgtgcaggtcggcgtcgagctgtacgaccgggaggggtatctggtggacctcaataacaaggacctcgaaatcttcggactcaaaacgaaggaggcggtgctgggcgtcaatttcttccgcaatccgctcgttccgcaggagatccgcgaaaacgtgcgcaacggacaggaacaggctttcaaactcgattaccatttcaaccggctggacggctactatccctccgaaaagaaggggaacgtccaaatatacacgacggtcaccatgctctacgacatgtacggcgagctgatcaatttcgtggtcatcaacatcgacaacaccgagatcaacgaagcctacagccgtcttgccgagttcgaaagttcgttttcgctggtgagccgcttcggcaaggtgggctatgcgcgattcgacctgatgacgcgcgacggctatgccgtgccgcagtggttccacaatatcggggagcggagcgatacgccgatgccgcaggtgatcggggtttacgaccatgtggatcccgaagaccgcgccgccatattccgggagatcgggcgcgtcaaggcgggcgaatccaacggcttcacgctcgacctgcgcgtcacgcccgaaggcgaaccgacgggatggacacgtgtcaacgtggtgcgcaatccgctgaacaccgacccgtcgaagatcgagatggtctgcgtcaatttcgacgtcacggagctgaagcagaccgagaagaacctgatcgaggccaagaacaaggccgaggtcagcgacaggctcaaatcggcttttctggccaacatgagccacgaaatccgcacgcccctgaacgccatcgtgggattttcgaacctgctggccgagacggacgacatcggggagcggcgtgagtacatgcgtgtcgtcgaggagaacaacgagctgctgctcaaactcatatccgacattctggacctttcgaagatcgaagcaggcaccttcgaattcaattacggccgggtggacgtcaaccgcatgtgcgaggagacggtgcgctcgctcagtctcaaggtcaaggacaaacccgtcgagctgatcttcggggagcacgacgcgcagtgctgcgtggtcggcgacaagaaccggctgattcaggtcatcaccaacttcatcaacaatgcggtgaagttcactgacgaaggctccattacgctggggtaccgtacggagggcggcgagttgcttttccatgtcgaagacaccggatcgggcatctccgaagagcataggcagagcatcttcgaccgcttcgtcaaactcaacagcttcgcgcagggcaccggactggggctttcgatctcgaagagcatcgtcgagcagatgggcggccgtatcggcgtcgaatcggaggtggggcgcggctcccggttctggttcacgattccggtcgtgacgtgcgacgcgcccgaaaaaaagggcgccgctcccgcaccgcgtccggcggcggtgcatggcgacggacggctgccgcgcctgctcgtggccgaggataccgacagcaattacctgctggtgtcgctgatgctccgcaaggagttcgacatcgtgcgcgcttccgacggcgaagaggccgtgaagatatgccgggaactcaaacccgccgcgattctcatggatgtcaaaatgcccggcatggacggtctcgaagccacgcgacagatccgcaccttcgatccgtcggtgccgatcgtcgccgtcacggcgttcgcctacgaccgcgaccggcaaaaggcgctcgacgccggggccagcgaatatctgtctaaaccccttaacggcgaacggctgcggcagacgctccgcgagctgctttcggaagaataggacagctccggaaacagtggccctgcggtatgccgtccggcgggattcgggctgtcatgggtgtcgttgcggctctcatactctgctcatgcaggtgcgcccggccggaaacggaaaacgggccgttgcccgaccggctcataagcgcatcacggagttttccgcaaacagagacctgtctgcgcccggttcagccacccttcccggcggcgacttgtcgcggtgcaaggagacgctcatgcagttgcgcgcagtttttcctgccgggccggacaagtgcgtgaaccgggaccggattccccggcgcaacgcccttgggcggagccgaacagacgatttctcccggtgcggctgcattattccgaaaatttgtactatctttgcaatgtttccatgagactttgtttcgcaaaacgggggtgcccggttttgacagcaggcagagtttgattgtaagcacgccgagcgctgtgtggcggctcgttaatcccgatgctcgatttacaaatggcaataacagctatgcactcgctgcctaattttcagagaaagttagcttaatcgccgggtccaaggaggcttggcgacgagtatcccggagagtggttccgctctttaaccgctttccatacggggtatcatcgatttagagatagtgcgccggaccgtcccggccggcgtgcgaaattcagggactgggacctcggttaggcggccgcctgccggaccggggtagaaggatcaagtggcggctaagcgtgtagaaagctttcgggttccctgtttggacgcgggttcgactcccgccacctccacaattattaaacgcatctgctttatttacaagtagatgcgttttgttgttgtattatccgttgtattgttcggtctcctgcatgaaaaatggatgccggctcaacatttcggcattctcttgcgcagacacttttatgtattttaagaatgtactctctttcgtgtgcccggtaattttcattatggcaatagttggaactcccgctttataggcgttcgtcgcaaaggaccgacgggcggtgtgagaggagacgagtttatatttcgggataattttttcgacgttctttcctccttcgttcttattgattagaacatcttcggtaattcccgccagccggcataattctttgatctgctcattgaacttttggtcgctgatcgtatttgtgagatcaaatccgctttcaatgatttcccggactacagggtgaataggaataacgaccgggatgccggttttatgggtcttgatcgtgatatgccgtccgatatgagcggcactcaaacgcgagaaatcggacacccgtagtccggtgtagcagccgatcaggaacaatccccgcgcccggcttaaagctgcgattttgcggggaatattctctccttcttgggctttgttgcaagcggcatccttctgaaccgtggaagggatatcgagggtgtatattttctccagctctttctggtcgagatatacattatctaccgaatcctttggcgctataaaatcccggtggtcggttccgtgttcattgtgaaggcggtcgcatacgcgtgattccctatatacctgcttcactatttttataatgttgccaaaataatttcgggaatacccctgctcgtaaaaccaatgctggaaccggttgtaaaaatcaatgtcgatttcactgatttgcaggtgatgccgtgtgtctttctcgaagtctcgtaatttatgaagcgcctgcgtatatttcacgactgtcagtttctctctggctatggaatagcgggggatatatatcttttccaaataatcggtgaaaaatcgcttctcggcatccgatgcctcttcattggttgcggtcaattcggcaatcttatctgcaaattctttcgcagcaggggaaatccgtgagtctgtgaaatatttcaccgttcttttcccgatttcttcccaccggtcgatttcatcgtttatctcgtttccctccttgaaatcggccgtcgtccgggcgcgcttcttggaatcgttccaatacttcaccggcacaccgattccgatgctcttcttgtactgtttgccatacaaacttacgagcatcacgatagtcgctttcggacggtgcttgttggtgaccgtaaaggttatcatagtctggattcattatggagcggtagcgtaaattattgcacttcgctgacaataattatccgctcgtatattttgccctcaaaggtatattcttcggtcttgccgagaacccagcgccagtcggtgattcgtttggcatcgtagatcgactgccatttactccagtctgtagccttgaatttgaaacgaaggttggctacttggtaaagctttatttctcttgattcgctgacgtccggtcgagatgtgtcggtcggagcaatttgagcaaaaacttcatcgtcggggaaaatgtcatatggaagccggtcgtcaatgcttaatagactgaatcctccacttacgtgtttcccttgaacatagaacgtctgtacatattcatgtccgactttatacttggtcgtatagggaaccggatcgttgctgctgtccttgctgcaagcgaaaagcagaggaacaagtaaaacaataagaattttcttcaccttatatttcgtctattattcgttgctcttttagaacttcatgctgagcactatttattttatcggtataataaatcgctattgttccttcttttgaaatgctaatcataatatctccgttaggggtattccacatggtcataaagtgtgcatgatctgttttgacagctgtcatttgcatatcagtagtgccgtcgaaaggatattcaaatttattgaccgaatttgagggtgaaccatatttttttgagtataattctacgagtgagaggtattttatatataagcgatcccaactctcttctggcttggtggatgcaatgaccatatgcactaaatcagccccttcaacacagtaaatgaatatatcacactcatatcctgcaaaattgccctgcaaaatattttcgtgactatctgtaggtttatagcccttttcaattaatttactccggaaagttgcaagggaaccgtcaatttcgattccagcaaatttaagatgggaatttacttcttgatgtatctggagattagctttatcattgtttgtatctgcggtggttacatcatctgattgagcctcaatatcgcgtaacattccactaaaaatagccttgcgaattaatccgtattggcctatattgccaacatatattccaagcgatctggcgcccacatcgtttttgtaaaaccctgtattaccatccggcagacccaaatcaaatgaatctcctttttttgctgtttctattgtctcgattgcttgatgtataaatgaaatagcctgttgcttatttcccagactcacaagcaaaaagcgtttggaggtatattttcggtcccgcatatcaaaatgatatgtagttccttggggtgttgttgttttgtataaatgatagttgcctagatcatacgaacctattttttctgcattcgacatcttagaaaattgcgcgaatacagaaaaaggaattgtaagcgccaataaaattgcgtataggatttttttcatacaactaatgttttcaagtgattgaaaagcctctggaatatattttacattatatttctcttgattacccccgtcacccgcagcaatcgacgcacgtcctcgaatggtatctcgctaaggcaccggaaggccgatttgtatttatattattaacatacaacgtcaacatatgtacaaatatataaaaaatatggacgaattatgaaaagcggatatcacgtactttattttaaaacagaataatttaaaaaagagagtatgagaagaactaaagatagcaggaatgcagataaaacgatgattgggaaattgggattcattttggaagcggcccgtaaacgaatcttccggtttttctccatccttcaggattatacagtaatcattctaaccggctcggtacttctgcaaatggactatgtcgaatgcaggcttcgtaagggcatatgtcgagaataagctttgcacttatgttctcgctatcacaaaaaaaatacgacctgccgtcactgcggcaggtcgtatttgtctgaagagcggagtattatttcttgtaccagtctttattcttttcgccgttcgtagcggcccattccgcataagcggggtagacctgatcgatcggggacttttcatttgtctggtcgagcagtttggccacgtccccgtcgttcgcacccgaaaggaagaacgcgaacggataattctcggcgcgtacgtagtagatgcctttttcgggaatcgacttgtcgtcgttcgtgccgaagaacgacatctcggcgcgtgccgtcggcgcttcgtaggggatatgcacctcccagcgtttccctgcggtcagcccgtcgcggtcggtgcggtagataaacggcttgatcgttccggcctgcgcctcggcgaccggcgcgtcgtatttcgccgtaatccggtaggtcgcacccatcgtctccttaacgtcgggcgtcagcagcacgaccttgccgtcgcgctcgaaatccgcggcttcgaacgtctcggcaccgggcttgcggacgctgaattcgagttttgcgtccgccgccgctcccgtaagggtcacggcgagtccgttggcgttgcctgcgaagttggcgaaggtcttcagcatgaacgactcctcgaaaacgcccttttcgttgaataccttctcgtaatcgctgcggaccatcacgtcgttcatgtcgtagtcgccgcggctgggccagaggtcctcgaaggcatagatgccgcgcagtacgttggccgtcttcttgccgtcgttgacatcgaccgacggaatgtccgtcacggcgtccacggggttggaggtcatcgtgaataccacgtcgctgaagttctcgtcgttggtgtggtcctcgaacgagaagagcaccgaattgatgccgcttttcttgtccgtatagcggaatacggccgtgcgcggcgtctgataggcgacaccgttgttattgacgctcagaccgtcggaagtcgcggcgcggtactttttgtctccggctctcagccggttggtccatgcgttggtcgccagcacgaagccgatgcggtaatcggccgggaatacggtcgtagctccggccttgctgccgtcggcgatttcgggataatagatcagctgtacggctgtgccgcgctccacgccctgatagagccgtgattcccacggcgagttgctccaccggccgtcctgcgtgttggggaagatcatcaccacattggcgtcggcgagcgacttgggcttgttgccggtcttatagtaataataacccatcgagctgttccagcaggtgttgctgcccagtagggtgatgactacttcggccgatttttcgagatagaggtcgcgcgaggagcggtactccttcggacactttttggtcgtgtcgaacacgcttgcgtgcgccttgaggagcgctccgtaattcttgaccttcagatcgccgtcgtattcgtagccgatgctgccgtaggtcgtgtcgtagctgcccagccatgtcttccaaccgtcccgctcgacagccgtcgaatgatactccttggcgcgcgtcgatgcgggggctgcgttggcaggtgctcccgattcggccgatgcggtcagcatatcgccgctgcgggtcgcttcgagcagggtgcgcgcatagaaggcgggggtcaatacataagccttccggatatacgcgggcagttcgatcgtcccttcgaaacgtccctgcccgtcggtatagccggcatagagcggctcgacacctgcgattttggcataggccgtttcggtctcttcgacgggacaggtgtcgtagacctcgaaatagacgttggccggcatcccggccatgtcgccgtaatcgacgcagagcgtgaccgggacggtcgtcgtgaagccgaattcattgaattccccgccctttgcgggcggttcgggcgacggggtggggttgtcgtgggaacaacccgccgcagcggccatcgccatggccgcaatcgttaggatagtgacgcttttcattatcgttgtcaattgcacctgctctgttttgtgtatattttgagcgaaagtgtatattataccgcaaaagtatgcaaaaaaaacgtacgttgtacgccgacgcacgaaaaattgcaggaaattattaaaaataagatttatagacccgtttatggtatccggaagatcttgccttcggcgaaagtcgcccagagggagccgtcgggagcctgcgcgaaatcatttccgcccgaattgcagcatttgacgctccacaacagcgtgccgtcttcgcctacggcggcaacggtgccgtgacggcccgcgacatagaccacgccgtcgcgcacgaatgccggacaggagttgtactcatacccccagccgaggtcggtgcaccatagttcgcggtaccgctccgccgaggtgtctatggccgccagctcgccgtccatcgtcttgtagtagaacctccgtccgtcgccgctcagtccggtcgtttcgcgcgatttgcggctgttgtcgcgccatagctgcttcccggtggcgagatccagacaggtcacgacgcggtccggggcgacgatgaagaccttgccgccggcgatgcggggtacgacgtgccccggcgagaagaagagactgccgctgccgttgttccacttccagagcagttcgccggtgccggcgtcgagacaatagagatggcggtcccatgcgccgaatacgagccgtccgtcggccagcgtcggacggccctgcgcctgcccgcagccgtaatcgtgccgccacaacagcctgccgctgcgcaggtcgatcttgcctatggaaccgattcccagacctatgtataatgccccgccgtccgtaagtccgtcgcccacgacagcgctctgcgtcggaaggtgccatttctcgcgccccgtccgggcgtcgaaagcccatatgccgcccgatgcggctcccgcgatcacgagtcctccggtgcagagcggagtggtgtaaagcccgtccggaaagacgtgccgccacaattcgcgtcccttgcgcgtgtcgtaggcgcgcagtacgccctgcgaattgccgtaacagagcacctcgccgcagaatgccgctcccgtcagcaccatggcgctgtcctgcacgaccagccgcatgcggccttcggcgtcgggcgccggcggcagcgggtcgcaggggagcgccgatatctgcggatcgtctttcaggcagaccgtataccgggtgaccgggggcatgccgagcggcttctcgcgtatgcgcaccgagtcggcgaaaaagtcgagcagcgtataccccggcgcttcgccccttttgcccgcgagtgcgcggcccggaatccccgcaatcccgtcgaagttgcgcagctgcagctggtggtaatggccgtacagcgatgccgtgacgcccacgcttttcagcgtctcggtcacctcctgccggttcgtcagatccccgttgagcgggtagtggcagaggcttacgatccgctcgccgggccgtgcggcggccgcttggcgttcgagccatgcgaggtcttcgccccgtatcattccgtcggccattttcatataaggcccgctggcatagcccagaaagagataacccttggcgcgggtggcgacgcatcccgcatgtccgaacagacggcggaatgtcgtgcagccgctttcggaccacgtcgtttcgtggttgcccggcaccgtgaaccacggcttgcggagctgcgacatgagtccgtgcacatgcgccagctcgcggtcgctccccatgttcgtcaggtcgcccccgaagatgaccagatcggcgtccgaagcgttcgcctccgcgacggcgatccggaagagcgaatcctgcgcgttgcccggcgtgacgtgtatgtcggtgaagaagacggtgcggagcgtatcggcgggcgggacctccccggccgttttcgccgcggcaggctgcggcgccagcagggtcaggcacatgcagccgcataattcgatgaacgggtttttcatggtttcggagcagttttatcattacaaggtacgaatttaggccgaaaaaacatatctttgcgtcactaaaaaaacagaagtccatgaaaaaaataatgctgctcggttcgggtgagctgggcaaggaattcgtgatcgcggcgcagcggctgggacagaccgtcgtcgcctgcgactcttatgcgggcgcccccgccatgcaggtcgccgacgcatgcgaagtgtttcacatgctcgacggcgacgcgctggccgccgccgtcgggaaacaccgtcccgacatcatcgtgcccgaaatcgaggcgatccgcaccgaacggctctacgagttcgaaaaggcgggcgtgcaggtcgtgccgagcgcccgcgccgtcaacttcacgatgaaccgcaaagccatccgcgaccttgcggccaaggagctggggctgaagaccgcccgctatttctacgcgacgtcgtacgacgagctgaagcaagccgccgcgaagatcggttatccgtgcgtggtgaaacccctgatgtcgtcgtcgggcaaaggccagtcgctcgtcaaaggacccgaagagctggagcacgcttggcgctatggctgcgaagggtcgcgcggagacatccgcgagctgattatcgaggagttcatccgcttcgacagcgagatcacgctgctcaccgtaacccagaagaacggcccgacgctcttctgcccgccgatcggccatgtgcagaagggcggggactaccgcgaaagcttccagtcgccgcacatcgcgcccgaacatctggccgaagcgcagcgcatggcggccgccgtcaccgaagcgctgaccggcgccgggctgtggggcgtggagttcttcctgagccacgaaaacggggtctacttctccgaactctcgccgcggccccacgatacgggcatggtgacgctggccggcacgcagaatctcaatgaattcgaactgcacctgcgggccgtgctggggttgccgattccggccgtcacgttcgagcgtctgggcgcctcggccgtcgtcctctcgccggtcgcctgcgcctcggcgccgcgttacgagggcatcgaccgcgcactggccgccgatccccgcaccgacgtgcgcatcttcggcaaaccctcggcccgcgtgaaccgccgcatgggcgtggtcacgggctacgccccgctcgacggcgatctggaggccctgcgcgaacgggtcaaggccgccgccgcggaaatcaaagttctggaaccttaattttatcgaacgatatggcacaatacgcaattatttcgaccgagaaaggcgacatgaaagccgaactctataccgatgagacgccgggcacggtggcgaacttcgtaaaactcgcggagagccgtttctacgacggactgactttccaccgggtgattccgggattcgtcattcagggcggctgccccaaaggcgacggcacaggcggtccgggttacacgatcaaatgcgaaacctcggctccgcgccagtaccacgaccggggcgtactctcgatggcccatgcgggacgcgacacgggcggctcgcagttcttcatctgccacacccgcgaaacgacgcagcatctcgacggccgtcacacctgcttcggccgcgtcgtcgaagggctggaggtcatcgacgacatccgtcccggcgacctgatcctctcggtccgtatcgtgaacgagtagcgcgccgctgcaatcgcagattatccctgaggtcgcagaattcgccaaaggctctccgtacggagagccttttttcgtcgcgggaagatccgttgcccgcaagaggagaccgcacggcggcctgtcctcctcttttccgcatcgtcggcatcagcgtggagcggcacgaagagagggtgtcgccggtctgatgctgcgggaaccggcaatgcgctgccgccgcgtcatatcttccggatcatttcgaactgctttccctgcggcacgatgtttttcgcttgcaggaatccggttatcgagccgcacgagacgtcggtatttatgattttgagggagtcgttcctgttcagccggagcatctcccgcagcagcaggccggcgattccctttctgcggtactgccgcttcaccgcgatctgcgcgacgtcgcccgacgcgggttcgaaaacgcagtagccggcgagttcctcttcggtgaagacgcccagactgacgaaatctccggcggctcttcctatggattcgaaactgttctgccacgagggcgtgaaatcccaaaaggaggagatcgaagcgaatttttcgggatctatccgtctcaccgagtggggcaggcggggcgtatcgccccggtcgacgatttccgtgttcgcccggcagaaatagttgaactcccgaaccgtctcgaaccccagattccggtaaacggacacggctccggtgttgtgctgcaacacctccagcagatactgtccgacgcccgcccgccgtaggtgcggcatcgagtgtctgaaaatctccgtggccagtcccgtgccccggtactccttgagggtcccggttcccgtgtcgtaagccgtcggcacgccgttgaaattgccgatgccgttcagcgtgaaagccgcgatctgcgctccgtcgaatgcggcgaacgacagggtgggatcgaaaccgcgccgtgtcagcatggcccgcagctgttccgcgttcagctgcacctcgtagtcggcgaacgcccggccgaaagccctgaacagcgtgttgaagtctgtcttttccagtgattttatctccatatgcgtcggtttcggcggaaaaatggccgcccggcaaggctatgcccgctctgtttcaaagatagtgatttttaccgatctccgcttcccgaattccgctttttcaccgcagctccggtccgtgcgacggccgggaaacccgcagcaaaaaaaagagaccgtctcaaaacgctgagacagtctctttgtcattcggttcttggaccgtatcgcctccggattattttccgaacttggccttgatgttttccgtcgccttcttcagcagctcctctgggcagcagagcgtgatgcggatgtaacgcttgccctccgagccgaagatgccgcccggagtcaggaacacgtcgcacttgtccatcacctcgtccgagaatgcgaaactgtcaccctcgtacgactccggcagttcggcccatacgaacagtcccgcctgatgctcgcggtatttgcatcccagcgcgtcgagcagcgcgtacgcctgcttctcacggccgtagtagatgtcgttcagctccttgaaccactcctcgcccagcgccagcgccgtgtcggccgcagcctgaatggggtagaacatacccgaatccatgttcgacttgaacgtgaggatcgagtcgatccactccttcttgcctacgaccacgcccacgcgccagccggccatcgaatggcctttcgacagcgagttcatctccagcgccacgtcgcgcgcgccttctgcctccatgatcgagatcggagccgccgcgttgcggatgaagctgtaggggttgtcgtgcacgatcagtatgttgtgcttggcgccgaaatccacgatctgctggaacagctccatggtcggggtctgtcccgtcggcatgttggggtagtttatcagcatcatcttcacaccgtccagcccggccttctcgatcgccgcgaaatcggggtagaaattcgtctccttgttgagcgcataggtcaccatctcgccgccggccagacgcacggccgccgagtaggtggggtagccggggttgggcaccagcaccttgtcgcccttattgaggaacgtcatgcagatgtgcatgataccctccttcgaaccgatcaggggcagcacctccgaattgtagtccagctcggtgcggtaccatttcttgtaccagtctgcaaaagctttgcgcaggatcggctctcccttgtaggacatgtatttgtgcacgtcgggacgctgcgcctctttggcgagacggtcgatgaccgactggtgcgggggcaggtcggggctgcccatagcgagtttcacgatctgacggcccgttgccgcttcgatttcggcgatctcgcgcagacggcgcgaaaaatagtactctccgatgccgtccaaccgatgggaacgggcgatgttgactgcttttgccatagtgtaatcaggtgtttggatttgctgtttgcaaagataggtattcctattaaaaattaaaagccatcgttgaattttatctcccttcggactctctccgccgcttcgtttcccgctcagacctgcttcggggcggtatgtcgggcgggtaacagttcgtaacattttttacgaaccgtccccttttacagcgcgaagagaatgaatatctgcgccgtcagcacgcgcaggaacatcactacgggatagaccgtcgaataacccacggccggcatgtcgttgcccgccgtggcgttggcgtaggccagcgccgggggatcggtcgtcgatccggcgataagtcccatcagcgtgtagtagttcatcttgagccacagccgcgctaccagcgcgacgattatcagcggcaggacggtgatgatgacgccgtatccgatccagcggtaaccgccgtcgacgatggcgtcgatgaatccgtcgcccgcgccgatgcccaccgccgcgaggaacagcgcgatgccgatttcgcgcagcatcaggttggcgctcatcgtggtgtaggtgaccagatggaaatgcgtaccgaagcgtccgatcaggatggccacgatcagcgggcctccggccagtccgagcttcacgggctggggcacgttgagcagcggaatcgaccccagcagcacacctaaagcgatacctacgaagatcgtcaccaaattaggctggttcagcttcttgagcgagttgcccaatacgtcggccacctgcgccacggccttcgcgggtcccacgaccatcacgcggtcgccgacctgcagttccaagccctgataggggatcagatcgacgcccgcgcggtttacgcgcgtgatggtgatgccgtatttcgtgcgcaggcgcaggtcggagaatttcttgccgttgagcgacgatttcgtgatcaggatgcggcgcgacaccagctcggcgttgggcgtattgttgccccactgctcgtcggtcatctccacgcggcggccgaagaaggccacgatcgcctcgatgtcctcggcctgcgagatcacccacagccggtcgccgaggtgtatcacgctatccgcatcggccatcgagatcgttccgtcgggacgcaggatgcgcgatatgacgaactgacggttgatcaggtcgcggacataggccaccgtgcggccgtcgagcgtcttgttggtgaattcgaccgacaccttgtcggcgagcttgtgctcccggctcagcgccgccagcccctcgtcctccttttcgaacttcacgcgcagggcgtagcggatgaagatcatcgtgaatatgatgcccacgacgccgagcggataggccacggcgtaacccagcgcgatcgtggggtcttcgatccccgacgcatcggcgtaagcctgctgcgcggcgcccagtccgggggtgttggtcacggcgcccgaaaggatgccgaccatcgtcggaatcggcgtgccggtcaccagatggacgacataggccgtcgccacgcccagcaatacgatcgccacggcgcacatgaccagcgtcatgccgccgtgtttgaacgatgcgaaaaatcccggtccgacctgcagaccgatcgagaagacgaacagaatcagcccgaattcctgcacgaaatgcctgacctcgccgtccaccgtcattccgaaatgactcaggacgatgcccacgaacagaatccacgtgattccgagcgagacgccgccaattttgacttttccgagcagaatgccgatggtgatgaccaacgcgaaggtcagcacggcatgggcgatgccgttgccgaagaacaaggtgtgtaaccactccatattaacctacttttgtacgaattgccagtaattgtgcaaaagtagtatttattatagaatttaaaaaactttgatgcgacttttatggtgccgatatacgtccgtccgtccgccgcaggggttgcggctaatacagataccgctccatcagcggcatgagcagcgccgtcgccagccccatcagggccatggccagcccgctcagagcgccctccacggcgcctatctcgatggcgcgcgccgttccgatgccgtgtgcggcggctcccagcgcaaatccccgcgcttcggcgtcccgcaccccgcagcggcgcagaatccactcgccgaagatgctgccgaagattccgacgcagaagaccacgaccgacgtgatcggcacgatgccgcccagcggtcccgacacggagacggcgatcggcacggtgaccgatttgggggctatcgaggtgaggatttcgcgccctgcgccgaacgccatggcgatatagacgacgctcagcacgcccgtcacgcatcccgcgagggttgcgacgcccaccggcagcagactgccgcgcagctgttccatctgttcgtaaagcaggtatcccaacgccacgaccgacatgcccagcgcgaaatcgagcgccgaagtcgcctgcttgtagcggggatagtcgatgcccgccgcgctgaggaagacgatcaccgcgacgaacgtcagcagtacgggatgcagcagcggcacccgcagccgtcggtagacggcgcagcccaagcagtagagtcctacggtgagcgtcagcaggaagagatccgaggagaggaatgccttgtcaatcatggtcgggagtgtttggagcggtttcgcgcagatgccggatgcgccgcaggcgcgaacggcggttcaggctttggaaggtctgccccgtgacgagcaggacgacgatcgtcgagacgatgcccgaaatcacgatcgcccacagattgtcgagaatcacccggtaggagtccatcagccccacgccgtaggggacgaagaagagcgccatggctcccagcaggaatttcgccgccggacgcacggtctcggctttgacccaacgcatgcagagcgccgcgaaaagcaggatcatgccgatgatgttacctgacacataacctccggtcaggatgctcaatgcgttgccgatcagccagaaaaggagtatgtaaaagagtccgagcataatttctgcacatgttcgcctgcaaaggcataaaggccgtgtacagcggcaaaattagtcgtctgtgcacaagcggcctgtttcggcgaaatttatctgccgcaaagatagcgtttttggccgtatgttgtacctgcaggagttgatttgtgagcggtcacggtctcctgtcgcttcgtctgcgtcccggaggatgtcgcgcgcagatgcggcgagccgaaatcgtccatcgcatattgatttgcagttgccgggcggcaaaacgccacgccggcgcatcctcccgcgatcagacggggtgcaggggcttcgccgtttatcgttgcgccgcaccgctttgagcggacactgcgcactggcgcacgacgcgcatccgccgcgcctgcgcccccggaagaagcaccggagccgccgtgcgagcaacaccgcgaccgccgctccgatcgcccataccgtataatcctgccatcccatatcagagccacatgaccaaatgatagacggcccatgccgccagccatgccagcagggtgttgtatgccacgctggcgacggcccatcgccagcccgcctccgagccgatggccgcgaccgtggcgatgcaggggaagtagagcaggatgaatacgaggaacgccagcgccgaggcgtgggtgaaatcgccgctcgccgtcagacgtcgcgcgagattcgccgtctcttcgtctccgtccgccgcggcatcttcggccgccgttcccggatttaggcccggccggccgtcggccgtcttcgctatgtagatggccgtcgggccgtccgcgccgccgatcacggcgaccttgccgtttggcaaatcgttgatcgacagcttcgcggtgtctgccatctcacccgattcggcaactatttcgatcgtcccggaaggctgcgccgccgcaggagccccttcggagtagagtacgccgagcgtactgacgatgatctccttggccgggacgcccgacaacagggccacgcccgctttccagttcagccccagcggactgaacaccggctcgcaggtgcgtccgagacgtccgaggtaggagttttcgtaatgttcgggcgtatttccggcgtcggtgcgggggtagtagctcaggaaccatacgaccaccgacgcgaccagaatcatgccgcccatcttgcgcagatattgcgcgcacttgtcccacatatgcctgagcgtcgttttccatgtcggcaggcggtagggcggcagctccatgacgaacggcgtttcgtccaccgggaacatgaaccgccgcatcagccgcgccgtgaagacggccagcacgacgcccagcacatagagtccgatcatcaccagcccggcattctcggcaaagaaggtgccggccagaagcaggtagatcggaattcgcgcgctgcatgacatgaaaggggtaatcagtatggtaatcagccgactgctgcgactctcgatcgtccggcaggccatgatcgccgggacgttgcagccgaagcccatgatgagcggaatgaacgatttgccgtgcaggccgatgcggtgcatcacgcggtccatgataaaggccgcgcgggccaagtagcccgaatcctccatgaacgagatgaacaggtagaggatcatgatgttgggcagaaagacgatcacggcgcccacgccgcccacgatgccatccaccagcaggtcgcgcagcggtccggcgggcatcatgtagtcgatcgcaccgccgatccagcccaccagcgcgtcgatccactcctgcggataggcgcccagactgaacgtgcaccagaacatgaaccacatcaggaagaagaagatcgggaatccccacagtttatgcgtcacgaaggtgtcgatctgcgccgtggtcgaagcctcctcgcgcttgcccggagtgaaggtctccctgagcgcgccctgtatgaatccgtatttctggttggcgactgccgtttcgacgtcttcgcccagcgcttcgctgatgcgcttggcttccagatcgcggatcgcggcccattcgggccagcggctgcagccgcgcagctgctcctcgacctgccggtcgccttcgagcatcttcatcgcatagtagcggggcgggaaggctttgggcagctcgccgcggaaagcgttcatgtcgccgttcaggcggcgcagtccctcttcgatgacggaccccatgttgatgtggatgtggcgcacgcgctcgtcctgattctcgtataccgcgatcaccgtgtcgagcagctgctcgatgcccttgccgttgcgcgcctcgacgggcaccatcggcacgccaagcatgcggcccaagttgtcgtaatccagctctgcaccgcttgagttaagctcatcgaacatgttgagcgccacaaccatgcgcgggtttatgtcgatcagctccgtagtcaggtacaggttgcgttcgaggttcgacgccaccaccgagttgataatcacgtcgggagtcctctcggcgatgtggctgcgcacgtaacgctcttcgggcgtgtaggccgaaagggcgtaggtgcccggcaggtcggtcacttcgaaacggtagccgcggtagcagcggtgcccgatcttggcgccgaccgtcacgccgctgtagttgccgacgtgttcgtgaccgcccgaaatggcgttgaaaagcgaggtcttgccgctgttggggttgcccaccagtgccacgccgatcgtgcggctgtgacggttgatgacttcgtcgatcgtcgcgcagccgtcatccggaccgggcgtctcggccgtcgggtattccggttccgcgggctgtccgtcggcgccgcatccgcagtgccggcggtggtgttcgtggtggtgatggtgcgagccgcccccggcgaggtattcgctggcttcgctgtctgagagcacgaccaccatgtcggcttcgctgcggcgcagcgagatgtcgtagcccatgatcttgtattcgatagggtccttcagcggggcgttgagaatcacttcgacccgctgtccgcggacgaaacccatctccatgatgcggcggcggaaaccgccgtgtcccgtcactttgagtatcgtggccgattccccggtcttaagttcggatagacgcattgtcgctctttggtttttggctccaaagatacgattttacgccgggatgtgcaatccccaaaaatgggtatttccggattgttcacgggatgatgcgcggcgggtgtcccgtctttgccatactattgaattatattgttatatttgcctgaataattttcttgacgcccatgacacgaatacattatcgcttgccggcgctgctttgcggatcgctggcggccgccggcgtgactgccgccgacggcaaaaacaaaggcgctgatccgaaacgcccgaacatcttggtgctgatcgccgacgacatttcccgcgacgatttcggatgttacggacatccggttatccgcacgcccaacatcgactccctcgcagcctccggagtgcgctttaccaacgccatcctgacgaccagttcgagcagtccgagccgcgcgagcatccttacggggcgttatccccacaacacgggggcctgcgaactccattcgccgatcggtgcggagcaggttaccgtcgccggagcgctgaaagcggcggggtattatacggcgcaggccggaaagtggcatttcggcgattcgtcggcgatccccgcagggccggtactgcatgatttcgaccggacgggaggcggctccaacgacgggggcggtcccagcggggccgaacgctgggtggaatacctgcgcgaccggcctgccgaccggcccttttttatgtggttcgcatctcacgatgcccaccgcggctgggatgacgaccgttcgctggaacgctatagccccgaaaacgttgtcttaccgcgcttctttgtcgatgattacccttcacgggaggatttcgccagctactattacgaagtgtcgcgcttcgaccgtttcgtcggcgaggtcgtcgccgaactccggcgtcagggcgttttcgacgacacgttcatcgtcgtcatggccgacaacggccgtcccttcgcccgtgccaagacacggcttctacccgatggcatccacacgccttttgtcgtccgttatccggccggaatgcgtgccaaagcggaggtttgcaacagcttggtgagcgttgtcgatctcgctccgacgctcaccgacattgcgggcgtcgcaacgccccgcgcattccaaggacgcagtttcgcatccctgcttgctcatcccgaccgcaaattccgtacatacgctttcgccgaacacaactggcacgatttcgaagcctgcgaacggatggtctgcacggaacgctacctgctgatcgaaaatgcccgcccgtggttgagtgccgtaggggcggcggacgttgtgaacagcgcttcgggacgctcgctgttcgaggcctatgccgcaggccggctggattcgcttcaggccgacatattcatcacgccgcgcccttcggtcgagctgtacgactatcgcgccgatccggaacagctggagaatctcgccgccgggaaatccgccgtaacggcgaagctgcttgccgtactgcggaaatggcaggcagaaacaggcgacacgacgcccgacagcctgacccccgactggcgttcgcgggaaacggcccgaaaactcccggcattcggggagcgccgcgagatgccgggaaaagctgccggagccgccctgattaccgctcccggaccattttagcgttccattgccggggtgtgcgctcaccatccgccgcccagcgccttgcagagattgacgtagttgatatattgctgcgccaccagattgacgaactccatctgcgactgatagaggctgcgctgggcgtcgatcacgtcgaggtagtcggacaggccgctgcggtagagcgcctgcgtcatcgcggcgatgcggtcgttggcgagaaccagctcgccgtagcgttcggtctgcctgcggtaggtggcgatggccaccagcgcctgctcgacgtcggaaaaggccgtcagcacggtctgctcgtaggtcagcgccgactgcgtgtaacgttccatggcggcctgttccgcgcggcgaagtctgccgaaattgaagacggggagtgtcagcgagcctaacgcatcccacgcccaagggttggccgaagttaaacctttgatcgaattggatgcgattccgcctttggccgtcagagcaatggacgggaaccggttgccgcgtgcgatgcccacttcggcggctgcggcgagcatatcgtaacgcgcctgcatgatgtcgggccgccgttcgagcagctccgagggcagtccgacgggaatgtccgccggacggtaatcggtcagcaggcgcagtccagcccccgcgctgtccgttcgccgcggcgtttcgcccagcaggatgtcgagtgacagccgcgtctgcgccacggcccgtcggtactgcggaatgtccgcttcggcggtgtagaccagactccgggcctgctccagcgccacgccgtccgacatgccgtagcggaacatcgagtcgatcagggccgccgattcgcgccgcagggcgcagctctgccgggcgatcgccagatcgcgttcgtattcgagcagggtgaaataggtcgtggcgacttcggccgccagcgccagccgcacgccccgcagcgcccactccgacgaggctatctgggcttttgcggcgcgtttggcattgcgcagctgcccgaagagcgccacctcccacgagagcgacggctcgacggcgtacgactgcacgatcttcgtggcaggcgtatattcgccttcggccgtgacgcccagcccgacctgcggcaggtactgcgcccgcacgctcttgaggttcagccgcgcttcctccacgcgcgaggccgccacggccacgtcgcggttgttgtccagcgcccgtgcgacgaggttgttgagcaccgtatcgccgaacagcgtccaccattcggggccgaagcgggtcgtgtcctccgagaatccccgcccgtagatgtaatcgtcgggcacagagacgcgcggcgggtagaagcgcggcgtgcaggccgccgtaaatgctgcgaaaatgattatgaggtatccggctttcatgactgttcctgttttttgcgttcgcggcggcgttcgaaaccgccgatgcgtcccacgaaatagtagagcgcggggtagacgaagatgcccagcagcgtggcgaacagcatgccgcccacgagcgcgacgcccatgatgttgcgcgccgtggcgtatacgccgctggcgaagatcagcggcatgacgccgaggatgaaggcgaaagcggtcatgatgatcggccgcacgcgcagtttggcggccccgatcgcggcgtccatgagcgaggcgccctgctcgttgaagagcctgtcggcgtactccacgaccagaatggcgtttttggccgccagtccgatcagcatcaccagcgaaatctgcatgtagatgtcattgacgtagaaggcgttgagcaggtgtgagacgccgatgaagagcacggcgcccagcaccgccacgggaacgctcatcagaatcgccagcggcagcccccacgattcgtacagggccgccagcgcgaggaacacgaagaccagcgccagcaggtagaccagtcctccggtcttcgaagcgttggcttcctgaaaggaggtgccgctccatgccgtgccgacgtcgtcgggcagtacctgcgcggccgtgcgggtgatgtcctgcatgacggtcgtcgtcgaggtgcgggccgcgggggtgaccgtaagtccgatcgaacggtagaggttgaactgcgagacgtattcgacgcccacggtatccacgacctcgaccagcgacgagacggggacgctttcgcccgacgaggaggcgacgtaatagctgtcgagcgagcgtttgtccatgcggtaggcgggggcggcctgaatgtaggtctggtagagcttgccgaaacgcgagaagttgttgacataggcgccgcccagcagggtcgtcaggtcgccgtaaagtacgcccaagtccacgcccgaagccagcgcctgctccttgtcgatgcgcagccgccgctgggggacgcccgcgttgaactgcgtggtcaccgacgcgacggagggcagcttgcgcaacgagtccatcagccgttcgctctgctccagcaggtaggccgtgccgcgcccttcgaggtcctgcacctcgaccgaaacgcccgacgtgatgcccagaccggggatcgacggcgggatgaaggcgaagcactcggcgcccggaaccgccatgtaaagctcgtcggtgagtttctgggcgatctccatggccgtcagtttgcggtcggaataaccgaccagcgacacgaagatgatgccgctgtcggtcgaagcgatgcccgccatcatgttgaatcccgcggcgaacgaggtcgaagcgacttcgggcagcgtgcggatcacttcgtcggcccggatcatggccttctgtgtcacctgcagcgacgaggcttcgggagtcgaaaccatcaccatcacgtatccctgatcctcttcgggcaggaatccggcgggcagtttgcgccacacgaggaagatgacggccagtaccgcggcgataaatacgcccgtgcgggccacgtggcggatcagcgtcggcgtgaaggccgtatatttgtccatccgccgggcgaaccagcggttgaaagcggcgaagaatcccttcttgggcggttcgcggcggcgcaggagcagggcgcacaaggccggggagagcgtcagggcgttgaaggccgagatcacgaccgacacggcgatcgtcaccgagaactgctggaacagccgccccgtgatgccgcccgtaaacgatacggggatgaatacggccagcaggacgacggtcgtggcgacgatgggcgaagccacgttcttcatggcttcgagcgccgcggcgcggggtttcatcccgttggcgatattgacctgcgcggcctccacgaccacgatggcgtcgtccaccaccagaccgatcgccagcaccagtcccagcagcgaaatgatgttgatcgagaaccccagcagcggaaagagcgcgaaggcgccgaccagcgacacggggatggcgaccagcggaatgaccgtggcgcgccagtcctgaatgaagaggtagataatgcagatcaccagcacgagggctatgatgagcgtggtgaagatgtcgctgatgccggcgtcgatgctggtcgtggtgtccacgaccgtcgatgtcgtgatgccgtcgggcaggcgttcgccgagccgcgccatttcggccttgaccttgtcgcctacggccacggcgttgctgcccggctcctgataaatgacgataagggccgtaggcttgccctcgaagagcgagcttacgccgtaactctggcttccgagcgatacgtcggccacgtcgcgcaggcggatctgttcgccctcagaggtggtcacgacgacgatgtcgccgaactgctcggccgtggtgatctgcgggggcatggtcaccgtataggtataggaggtgccgtcgggcgctggttcggctccgaactgtccggcagggtagatgccgccctgattttcgatggcggcggtgacggccgaaaccgggatgccgtagtatttcagcacgtcgggccggagccatacgcgcatggcgtactctccggcgcccatgatcgagaccttgcccacgccgttgatcttcagcagttcgttctgaaggttgatgtaggcataattcgagaggaattcgtcgtcgtagcgtccgtcgctgtgcagcgagaagaccagcaggaaacccgtcatggtcttgcgcgtggtgacgccctgcttggtcaccgtcgccggaagctgggctgcggccgaggatacgttgttctgggtgaagatggcgtcgaggtcgggatcggacccgatgtcgaaggtcacctgcatgaccatcgaaccgtcgttggcgctcgtggtctgcaggtagagcatgtcgctgacgcccatgacgctctgtgccacgggcgtggccacggcgttattgaccgtctcggcgtcggcgccgtcgtaggtcgccgagacctcgaccaccggaggcgtgatgtcgggatactgctcgatcggcaggttcaggatcgagatcaaacccacgagtacgatgacgatggccagcgagatggcgaaaatcggacgtgaaatgaagaatttctccatgacgtcagcgtattacggggattaccttcatgccgttgcgcagtttctgctggcctgccgtaaccacctgttcgccctcggcgagcccctcgtccacgcaccacatcgtgccgtaggtgtcgcccagcaccacgcggcggtaggccgccgtgctgtcgggccgtacgacccagaccgaattgacgccctgcgcctgactgacgctctgctgaggcacgatcacccgcggctgcacggggccgacgttggccgagacgcgggcgaactgcccgggtttgagcgaccggtcggggttggggaacatcaccaccagcacgagcgttcccgtgctgctcgacacgtccttgcgcgtgtagtcgtagagtcccccgtaagggtagcgcgtgccgtcggccagcgtcaggcgaatgtccgagagcagcccctcgttgtcgtagatcgaaccgcgtcctccggccgccctgaggtattcggccatcggaatggccacatcgacggtcagcgtgtcgatattcgaaatgctcgtcagcacgctgaactgcgtgccgggaccgacgtagtcgcccacatgcgccgccgtgtgttcgatgatgccgtcgatgggcgagcgcagctcggtgtagccgacgttcatgcgggcgctgctgagcgtctgctcggccgagcgcaccgaggcttcggcggccttgtactgcgccgtatactgatcgagctgcgcctgactgatggcgttgatcttggccagcggcacggcgcgctcgtagttgttctgagcctccagcgcctgcgccttggccgactggagcgcggcttcggcggcgagcatcgtggtcgaaagctggtcggggtcgatcgtgaaaagcagctgcccgcgttttacgggcatgccgttcgaaaaccgcttggataacagaaagccattgatccggggctggatcacggcgtcgaaattactcgaaaggtaaccgatgaagctcatgcggttggggatgctgtccgtaacggcgcgggccgtttcgacctgcaggggcggcattgcgggtttcggcttgtgccggccgcacccggcgggcaggagcgcggaaacgagtcccgccacgattaaaagtctgttcataccggaatgttttacgctcttgcggggacaaaaaacgtaccgcgaaccgggtgacaggctcttggaaagggggttttatgctaaaaaacgttgaattttttggcaataaatgatgatgtttagataatttttatatctttgcgttgataacaaacccaattaataaaaaaagttatgaaagaattagtagcaaagatcaatgcagagtacgaagtattcgcagctaatgcagcagcacaggtagagaagggcaacaaggccgccggtacgcgcgcccgcaagtccgctctcgaaatttcgaagctgatgaaggagttccgcaaggtttccgtagacgctgcgaaataattacagacacaatgacgcaacaaaggctgtccccagggggcagcctttgttggtttcatacgggccgtgaacttgcctaaagtttgatgccgaagcgggcgaaaacctccatgtcctccggttcgagaccggttttgcggaagggaacggcctcgttgtggtcgttcaggtaacggcgcggacgcttgcggtcgtagtcggggttcacgagcgataccgtcggatcgacgaagcggccccggatcgaggccatgtcggccatggtgtggaacagggcgtgggtcgtggccggcgccgtctcattgatcccggcagccgcggctttggcgggaaaattccgccggtaggcgtcggagaaccacgccagcgaggccacgtagagctgataggcggtcgtggtgggcgaggcgtgcaggaagcgttcgcggtcgtcgtccagaatgtcctcgccgtggtcggcgcagtagagcagcgccgaggaggtttgccgcagtccgcgcaggaaggcgatcgtctcggcgagaaaatggtccgtgtaacagatcgaattgtcgtaagcgttgcggagcgtgtgcgcatgctcccgcgagatcgccacgtcgtcgtcgggtttgaaacgtgcgaattcgcgcggataacgctggtggtagctgaagtgggagccgtagcagtggaggatgaagagcatcttctgcgccggggcggtctcgacgatgcggcgcatttcgtccagcagctgcatgtcgtggcgcggcgagcggatatagatcaggtgatcggcgtcgcgggccagcttgtcgatcatggcgccctgcggcgactggttggagatgaaccacgtttcgaagcccgcttcgttgaagagggcaggaagccctttgcggcggtagagctggtcgtgctcctcggtcgagacggaggagaggatgagcggcacgctcttgtgcgtggtgttgctctgcgtcagcacatcgcggaaaatcaccagatcgtccacctgcgagagccggggattggtctcccgttcgtagccgtaaagctcccagctcatggcgcgcgacgcttcacctataatatatacgtaaatctcgcgtccgggcgcttcggcctcgcggctggcctcgtaggtgaaatccgccgaggtcttttcgaaattgtaggccttgcggaattccgaggcgctcaggtagacgttgtaggccacgttgagcgggaaaatctcgtcgcgcagcacgtgccgctgttcgctcacatgataggccggccacagggccagcatgcccagcgccatgagcgcggcgcccgaaaggccgacgttcatgcgcgtcgtgcgcgaaatgtagcgtttgtggccgatctcgcgcgccgcgaaccacaacagtggcagatacatcacgcagaccagaatgaccgaagggtagatgttgctcagcagttcgcccgcctctccgggattggtcgtcaccagattggtgaacatgtccgtggcgatgatcgagttgccgaacagatagagcagcacgatctggaacgcgcagaggaagataaagggaaatcccagccagatcatcacgccggaacggctcagcgccacgctccacatcatgtagaagcccagcggcatcagaatcagcgcctcgaccgtccagccggagtagggctcggtattggccagcacgcagttggggataatcagcgcgacgaagaaatagacggtcagcagcgtggtgaaacggctgcgggttttgaccgtgcgtcgtctgtttaccctattcggatcagcattcatatcgttacactaacctaaaaagcttcgtttatgctcagcaggaagccgctcgtcttcttgccgaagccgtaatcgagtcgcacattgacccgtttcttcaattcccagcgcaggccgacgccgtagttgggtagcgtctcggaccagtcgaaccgctccagatcgctgaatacgttgcctgcgccgccccagaaggtgcagccgatgcgccgccagatgcgctggcgcagttcgacctgaaacgttatcatgtcgttgtccgtatagcggccctgataataaccgcgcatccgctgcgagccgcccatgcgggccagcatcggccacggggttccctcggagttgaactccgcgtagaggtccgccgcgaggatgccgcccttccacacctgcctgtagtagtcggctgtgaaggtcgtgcgccacagcgaacgtccgcagttgcccagtcccttgggaaacagcgtctcctgcagactgacgtagacgccccggaaggagttgggtatgaagtcgcgcgagtcgtattccagaatcgccccgacgcccgtggcggtgtagtgcgtcttctgcccgtagaggtagctctcgcccagcggcttgaacttcttgccctgcgtatgctcgaaactgaggatgccgcccacataggtgttgggcagcacccggtgcaggtagcttgcctttatcaggtaacgtttctcgttgtaggagctctcctcgttgtagcggccgtcgttatagccgatgccccacatgtcgcggggcgccgaagcgaacatcaccgtatagtcgatgcgcttgccgttgcgggagaagatgttgttgcccgtgacgcccagcgcatagaatcccgaaatcgagacgttggcgaagatcgaaatgtccgacggcgaagtgaccgagtccgtacggtctatgcggtagagtccggccgccagcagtccgatgccgagactcgtattcttcgaatagctggggcctccggcgaaggtgaagtcgattttcttctcaaacgtgcggtcgcgcgtcgatccctcgaaatatttcaccacgcgccgcgggaacgagagccgtttctgcggctggggctgttccggaagcggggtatagctgtaatgcagcgtgtcgctgccgttgatatacactccctcttgggccgctccctgcagcgcgaagcaaagggcgaaagccagaacggcggttttgcgcagcatccggttatttgtacttctcgatcgtttcgtagaaatcggccttgtcctgctccgagagaacccccttgcgcaggaagaccagctctccctccttcgatacgatcatcagcacgaactggttgttgcagtcgcccagctcccaagccttgctcaggatacggtcctgatcggcgagcaccagcgcgccgttcttggccgtgcgtttcttggccatgttgcgggccatgccgttggggaccatcggggcgtccttgaggttcatcacgccgaaaccgaaaatattgtcgctctgggcgcggtggttctcctccagttcgaccgtgaaatcgttgttctgcttgtgacggtcggggtccacgtagaatatcatcaggttcttctcgccccagtgcggcagcttggccggattgccgtcgaggtcgagcacttcgacattattcactttgcggggcagctcctgagccgccgctgcggatgcggcgagcgtgaaggcggccagcatcccaattactttcatcttcatagtaatcctgttttttggtttcaaaagaaaacaaatctgggcaaagttacaacttttccgccaacatacggacaatcagccgttataatattgtccgtatggttcacttttttggtttggcaggtgccagagccgtgtcgaaggcgtaaagtccgccgccggaaataatcaggaagacgtagacgcccagccacacgaactccagctccccggcgccgaatccgccccacgcgaacatcagcaggatgcccagcgagagaatcagcgccgacatccgcacccagatgcccatgatgatcgccaccgccagcagcacctcggccaccgtcacgacaacgaacgtcgccgcgctgccggccgaggcgaacgacgggtacgaattgacgatttcgttgtaatcctgcattttgccgatattgtggaagagcatcatgcctcccgcgaacagtctcatgtagagcacggcccaatccatgtgccggtattgcccgatccagtcttcgattctttttcccatgctccggcatcgtgcaatttgtattccaaaggcgttccgggagcgattcgcacccggcctgcgccgttccgggcgcgctcccgaaccgcagacggcccggcatggacggatatttccgccccgaagtccggagccgccgatgacacggatgccgaccggcctccttgaccgacacaaggtctccgggcggatatttcccgtccgccgcccgcttcgacgcgctcccggacagcctgttccggcagaaacggccctgaattttcgtcttgtcgcccgattttcgttatctttgcgcccatgaagaccaatatccttttcgtctgcctcggaaatatctgccgctccccggcggccgacggcatcatgcaccacatcgtcgaagagcggggactcagcggccggatcggaatcgactcggccggaacctacgcggggcacacgggcgaactgcccgacgcccgcatgcgccgcgccgccgcacggcggggttacgacctcggccaccgcgcccggcagatccgggaggaggatttcgaccggttcgacatgatcgtcgtcatggacgacatgaactacgagaacgtccaccggctcgcgccgtcgcgcagggccgccgaaaagatcttccgcatgcgggagtttttccgccgccactcccgttgggaccatgttcccgacccctattacgaaggcgccgaaggcttcgagctggtgctcgacatgctggaggacggctgcgggggaattctcgaatacctcgaaaatccgcagtgacatgcagaaaaaaagcaatccggagacgtcccgtccccggattgttgttttcgcagcggcttgccgaagccgccgtatcgagaccgcgcgtcagaagtcgagtccgaaactgatgctgtaggtattgtgcagcagcgtctgcttcttggcgatcaggtaggcgaagtcgagacgcaggtgcaggaaccggacgcccgcgccgaccgaaccgtaggaagggtagtagtcgcggcgctcgccgtagtgataacccgcccggagctggatgagctgcatcaggttgtactcggcgccgaccgacatctggaatccccggactttcgaaggcgagaaatagtagcccagatccgcgccgacggttatctcgtgcacgtcgctgaggaacgtatccagcgccacgcccgccgtcaggtccatcggcagggtgtagggcgtgtctttcagatagccgcccagattgcccagcttggcgcccgcgcgcagcgtcgaatagctcccgacgttttccagcgggtgcgaccatgcggcgctcaggtccacggccagcgcgtccgccgaggtttcgggacgcttgaggtgcatgtagcgggccacgacgccgacggcccagttgccgccgatgcggcgcgagtagcccagatcgaccgccatgtcgttgttgccccgctcgcgcaggtactgccgccagccgatctgcgccagattgacgttgtcgaaacggcagaatcccgtcacggcgtagtagtcgaactgcccctgcccgtaataggacgaggatatctgcgacggcatctgcgagaaaatggccgtcgcggagttgttgtatatggcgtgcgacccagacagggtcgtcatggcgacgccgcccatgccgagcgtcttggcgtcgggcgtcggcagggtcgcttcctgcgctgcggcgcagagcgtcgcggcgagcagtgtcagtgtggttatcagacgtttcatacggcaaatatagcgaaaggcgggcggcaaaacgaaaatttgtctcctgatttgtccggaacgccttccatgtgcggcaaatatagcaaaaaagatgcaagttccaccggtgcgcccggcctgcgatcgggcttcgggacccgccgctccggacgggccgcgacgccggcgtgcggagcatgatgccgtcaggcagaaatctgcttcaggcactcctcgaccagtttgaaaaaccgggatatatgcgcgccgtccacgaacgcgtggttgacgaagatcgagagcggcatcacgagccgcccttcgcgcatcaccgccttgccggcgttcatcagcggatattccgtcggctggcccggcgctccctgcgcgtaggtcagggaggtgaaatagaggtccggcgtggcgctcagcaggaagacgtcgtaatcgccctgcgcctgcagcaccttttcggcgccgtagggatcgccgtcctgcggaatgtcggtgacgatggcacgcgcctcggcgtagaagcgctcgaaatcggcatggtatgggatgcggacggtgtaaaacgtacggcccggaacggcgatgggcgagatgacgtccaccgtgtcgtgccagatcacgtttccgcggctgtccgtgcggtaacggaactccttgatttcattgaccgcgcgcagcacggcgtagaggtaatagaggaagaaggagcgtcccgcggctttggccgccgcacgggcttcggtgcagtcgatctcggtcgccaccgaaatccacgaattgaggaagttgcggaaaaaggcgtaattgtcccgccgctcccaagtttcgatgtctacggtatgtttcataaggtatggcgttaaataaaacgtccgctcaagcagacttggcggacgcttttattgtcggtcgatgccgcggggcaccgaaccgctgctgttttccgattgccgggagattcctaacagttcatcgcgccgcagcagtggatgacttgtccgctgacatacgacgaaagatccgatgcgaggaacagcgcgaccttggccacgtcctccggcgtgccgccgcggcggagcggaatctgcttgtaccagccctccttcacctcgtcgggcagtttgtcggtcatctcggtcatgatgaagcccggagcgatggcgttggcgcggatgccgcggggccccatctccttggcgatcgacttggcaagaccgatcatgccggctttcgacgccgagtagttgcactggcccgcgttgccgctgacgcccaccaccgacgacatgttgatgatcgagccgcccttctgacgggccatgaccggcgtcacggcgtggatgaagttgaacgccgacttgaggttcacggtcagcacggcgtcccactgggcttcgctcatgcgcatcatcaggccgtccttggtgatgccggcgttgttcacgagaatatcgatgcggccgaaatccttgacgatctcttcgatgaccttgtgcgtctcttcgaaattcgccgcgttcgacgcatagcccttggccttgacgcccagcgccgcgatctcggcttcggtggctttgccgttgtcgtcgatcacgaggtcggtgaacgccacgtcggcgccctccttggcgaattcgagtgcgatggccttgccgataccgcgggccgcgcccgtgacgacagccactttaccttcgagtaatttcatagctttcaaagtattaagaatgtttgcaaaatattctgtttttccttttttcgtccgaaagacgaacaaagttaagaaaaatattttgaaacgctccgccgccgccggaatttcgccaaatattactaactttaccgtccgtaaacgaatcatcacaaatccttagagatatgaaaagagacacccagattttcgatctgatcgccgccgagcgcagccgtcagatgcatggcatcgaactgatcgcctcggagaacttcgtaagcgaacaggtcatggaggccatgggctccgtgctgaccaacaaatatgccgagggttatcccgcagcgcgctattacggcggctgcgaagtcgtggacaaggtcgagacgctggccatcgagcgcatctgccgtctctacggcgccgagtacgccaacgtgcagccccactccggcgcgcaggccaatatggcggtattcttcgccgtgctgcagccgggcgacaccttcatgggactcgatctggcgcacggcggccacctttcgcacggttcgccggtcaacatgtcgggcaaatacttcaacgccgtgggctaccagctcgacgaggcgacgggcgtgatcgactacgacgccatggagcgcaaggcgctggaatgcaagccgaaactgatcgtcggcggcgcttcggcctattcgcgcgaatgggactacaaacgcatgcgcgaaatcgcggacaaagtcggcgcgctgctgctcgtggacatggcccacacggccggcctgatcgccgcaggactgctggacaaccccgtgaaatacgcgcatatcgtcacttcgacgacccacaagaccctgcgcggaccgcgcggcggcattatcctcatgggcagggatttcgaaaacccgtgggggcttaccacacccaaaggcgcggtgaagatgatgtcgcagatcctcaactcggccgtattccccggcattcagggcggtccgctcgaacacgtcatcgccgccaaggccgtggctttcggcgaggcgctcgaccccagctacaaggagtatcagacgcaggtgcagaagaacgccaaggcgatggccgaagcattcgtgaagcgcggctacaagatcgtttcgggcggcacggacaaccacctgatgctggtcgatctgcgcaccaagttccccgaactgacgggcaagctggccgagaagtgtctggtggcggccgacatcacgaccaacaagaacatggtgccgttcgacagccgctcgccgttccagacttcgggtctgcgcttcggcacgccggccatcaccacccgcggcctgaaggaggacaagatggactacatcgtcgggctgatcgaccgcgtactgcacgaccccgaaaacgaggacaacatcgccgccgtacgcagggacgtgaacgccctgatggccgattatccgcttttcgcttggtaatatgaaagaggtaatcgactttttccgccgcctgcacgacaacaacgaccgtgcatggttcgacgcccaccgcgccgaatggacgcacgtgaaggggcggttcgccgccttcacggagcggctgatcgagggaatcgccgagttcgaccctgcggtgcgcggcctgcgggtgcaggactgcacctaccgcatcgcccgcgacacgcggttcagccccgacaagtcgccctataagacatatataggtgcgtacgtcgctccgaaaggcaagaagtcgggattcgccggttactattttcatatcgaaccgtgctgcgacagcctgatttggagcaacgcgctttcggcggggctttactgccccgaaccggtcgtgctgcgcagcgtgcgggacgaaattacggacaacggcgcggaaattgcagcggcgatccggaaagccaaagggttcgaccttgtcgaggagaacaagctcaagcgggtgcccacgggattccccgccgacagcgagtacgccgacatgctgaagctcaaggatttctacatcgccaagcggatcaccgaggagttcctgctcgcggacgacctgctggagaagactttggcggagttccgccgcacgcagccgttcgtagcgattctgaaccgcgccgtgcagttcgcctacgaggagatgatgtaattttatgcagacgatatgaaacggattcttgtattattcgcgctcttcgccgttgcggcgggttatgcgcagacggtcgaaaagcagaccttcgtctatgccgtcaagcagaccgacacgctgcggctggaccgctacgtggcgctcacgcccgacagccggaccaaaccctgcctgatgttcgtcttcggcggcggtttcgtgggcggccggcgcgacaatgcgagcttcctttcgtatttcgaatattacgcccggaaagggtatgtggtcgtgtcgatcgactaccggctcggcatgaagaaggccatgcaggccggaacgctcagcgaggagaccttccccgaagcttggatcacgacccttgcgatggcgaccggcgacctctacgacgctacggcctacgtctgcgaccatgcgtccgcgtggggcgtggacaaaacccggatcgtggcgagcggttcgagcgccggagccattacggtactgatgggcgaatacggcatctgcaacgggcatccgctggcgcagcagaagctcccgcaggactttaactatgcgggtgtaatatcctatgcaggagctattttcgacacgcaagaagagctacgctgggccaagactcccgcgccgatgatgctcttccacggcgatgccgaccgcaacgtcccctacgacgccgtgctgtacgacggcaacgggttcttcggctcgaagcatatcgccgatatgcttaccgaacggcgcatcccgcattggttttactcggtcgccaacaccaatcacgtcatggcgacccgcccgatgtacgacaaccgttacgagatcgacgcgttccttgaaaagctcgtcctgaagcgtgaaccgctggtgatcgacacctacgtcacgccgctggaagcccccgaactgccgaaggcctttacgctctccgattatatcgacgccaattacggcaaatagccggctgtccgttccgttttatacgaccgtcctccacaggaggacggttttttttatgaaaagctcaccgtttttttcggtttcgaataggtgatagtcccgtttcgcttgtatatataagcaagaaacgaagttatgcgacaacaaatccagcaattcggcaggaccctgagcggcatggtcatgcccaatatcggcgcgttcatcgcgtggggattcatcaccgcgcttttcatcccggagggatggtggcccaacggacagctcgcacaactggtcgggccgatgctgacctacctcctgccgctgctgatcgcctacaccgcagggcgcaacgtcgccggggagcggggcggggtaatcggcgccattgccgccgtcggcgtgatcgtcggcagcgacattccgatgttcatcggcgcgatgatcatggggccgctggcgggatatgcaatccgccggttcgaccgcatggtcgaggggcgcgtgaaggcaggcttcgaaatgctcgtcagcaacttctcgatcggcattctcggcatgctgctggcagttctgggctactatgtcgtcggcagcgtggtcaccggcctgacgatgctcataagcagcggtgccgagctggtcatacgccacggactgctgcctcttgtgtcgcttttcgtggagccggccaaggtgctgtttctcaacaacgccgtcaatcacggaatcttctcgccgatcggcatcgaacaggcccgcgaaacggggcagtcgatcatgttcctgctcgaaaccaaccccggtcccggattgggcgtactgctcgcatactggcttttcggccggggaaatgcgcgccagtcggctccgggagccgtgattatccagtttttcggcggcatccacgaaatctattttccctacatactcgcccgtccggtgctgatcgttgccgcaatcgcgggcagcgccgcgggactgctgtttttctcgctcaccgatgcggggctggtggctccggcgtcgcccggaagcatcctctcggtgctggcgatggcccccaaaggcaagacgctcatcgtcctgctgggcgtcgtgatctccgcagccgtgtcgctggtcgtcgccgcgccctttatccggcgcgcgtccaagaccgaaacggaaggcgatccagccgtcgggaagctcccgcaaagcacagcgggcatatcgccgcatgcagccggacgacccgtccgcaaagtgatcttcgcctgcgacgcgggcatgggatcgagcgccctcggcgcgacccgtttccgcaaacgcttacgggacgcggaaatcggcgttgcggtgggcaacagtgcggcggaccgtattccgtccgatgccgatgtggtcgtatgtcagtccgtactggcggagcggatcgccgcggccgcaaaaggcgccgagctgatcgtaatcgacaacttcctctccgatcccggtctggacgccctgttcgtccggctggaggaagcggaaccaacggcggcaggccccgaaaccgtatcctgcggcgaatcggactccgatatgcccgccgcccggcttgcggaagccgtattgccttccgacgtctgcgacgcccgatctgccggagcgacgccctcttccgaaacatccgcgttccgaccggcagaaacaacagcgtctcccgacatgcccgccgcccggcttgcggaaactacgccctcttgcggtgtatccggttcccggtccgcacaatccgcactctcttgcgaccaatccggtctgcggggcgccgcggccgattcggccccgcaacccgaagaaaccgcatccgcccccaaggacgccgctccggacggcgccatcctgcaacccggaaatatccgggtcggactgcctgcggagccgaaggaggaggcgatccggcgggcgggcgaactgctcgtcgcgggcggatatgcccggccggagtatgtcgatgcaatgctgcgccgcgaaaagctggcgacgacctgtctggggatggggcttgcgattccgcacggaacctccgatgccaaggagcgcgtactgcgctccggcatcgtgatcctgcaataccccgacggcgtggatttcgacggcgagaaagcgcacctgatcgtgggaatcgcaggcgtgggggaggaacatctggaaatccttgcccggctgagcgcatcgttcgaggacgaagagctgttgcagcggcttatgaccgcgaccgacccgcaggtgatctacgacgcgctgaaatagccgcaggatgcacaaccgaaaaatcgaccgaaccaacaacgacttatatgacatcgcaaaaagtaacgattacggctcccaacggcatgcacgcgcggccggccggggagctggcaaaacttgtcaagggctttgcgcccgtcaggatcactttccgcaccgccgctaaggaggtcaatgccgcgagcatgctcgccctgctgtcgctggggctgaagtgcggcacggagatcgaaatatgcgccgagggcggcgacgaagccgccgccgtgaaggccgtcgcggcgttcatcgcaaacatgagcgagtgatgcgcgtgcttcggaccggaatcccggcggcgggaattgccgcaggaacggcgttcgtcctcgaacgccgcgtttcggccgcaccgtccgccgcgcccggagatccggcggccgaaacggcccgcttccatgccgcgctggcgcaggcgaaaacggagctgggcgtattggcggcggaaaacgacatcttcgcggcgcacttggagatggccgacgacccgatgctggcggaacaggtcgaagagcggatttcggaacacggcttttcggccgaacgggctttggacggagcctgtgaagaggtgtgcggcatgctcgccgcgctcgacgacgaatacctcggaggccgcaccgacgacgtgcgggacgtatgcggccgcatacgccgtattctcacgggcgaaacggccgaaaatccattcgccggacttgctcccggaacgatcgtcgtggccgaggaactggcgccgtcggatacggcgctgatggatttcagccgcatcgcgggcgtggtgacggcccgcggaagcgtcacgagccatgtctgcatcatcgcccgcgccaaaggaattgcggcgatggtcggagcgactgaatgtatgcttgaaataaaaacaggcgacaagctgataatcaacggagaaaccggcgaaataatcgtcgctcccgataccgcaaccgaacggcgataccgcgccctgatcgcatcgcgggaacggcacggcgcacattgcctgaaaggtgcgcatacgcccgccgtgacgcgcggcggacggcgtatcgccgtgctggggaatgccggcagcgtcgcggaggtgcgcgcggccctcgatgcgggagccgagggaatcgggctgttccgcagcgaattcctctacatgcagagccgcggcgggtttccggacgagcagacgcagttcgaagcctaccggcatgcggcggagttgtgcggcgaacggccgttagttatacgaacgctcgatataggcggggataaagcattgccgtacatggatttcggacatgaggaaaatccgtttctcggatggcgcgccatccgcgtttcgctctccatgcaagacgtgttccgtacgcagctgcgggcgttgctccgggcgagcgtattcggcaacctgcggatcatgttcccgatgattacgtcggtcggggagttccgccgggccgaagccgccgtgcgggagtgcatggcggagctggacgcggaaaaagccgcttacaatcccggaatcgagctgggcgtgatgatcgaaacccccgccgcggtcatggtcgccgacctgctggccgcggaagcgcggtttttcagcatcgggaccaacgaccttacccaatacgtcatggccgcagaccggggaaatccgcgcgtggcgcatctctgcgacccgttcgatacggccgtgaaacgctccgtcgccatgacgctcgcggcggcgcgcagcgcgggcatcgaagccggcatgtgcggcgaactggctgccgacccggaagccacggcgtggctgctcgaagcgggactggaggagttcagcgtcagcgcacccgccgtcgcgccgctcaaagagcggatccggacgctggacctgcctgaggtgcgaaaaacacccggtgcagccgaataaatttgccgcggcacgcggtttacactatctttgaacccgatttacctgtttaatccaaaacaaaataaactgcaaaccatgaaaaaaacactgctcctgctggccgccctgaccttgtcgccggccctttatgcgcaggactaccatgtcgtactctgggacaacgcgacggcgcccacctccaacggcctgacgggcgaggagattcagcccaaacccggccagtggtccaacacccagaaagccgaaatgtggatctacaaggccggagacaatgccacgggacaggcgctggtattcttccccggcggcggatactcgacgctttcggtcggcaacggccacaaggaggccaagtggttcgccgaaaacggcgtcacggccgccgtggtgaaataccgcctgcccaacggtcacggcgaagttccgcgcaacgacgccgacgaggcgctgcgcgtcatgcgcgaaatggccgctgagctgaacatagacccggcgaaagtaggggtgtcgggcacctcggcgggcggctatctcgccggcagcgtgggaacgctttcggaagtgaaacccgatttcatgatcctctactacccggtgatttcggccgacgccgacaaacgccacaaggggacgttcgtgcagctgctcggcgccgacgatgccgacaaacccgtcgcgcaggagttctcgctcgaaaagaaggtcgatgcccggaccccgccgacgctgctgttccactgcgacgacgacaaggtggtgcctgccgtgaacagcgcgcttttctaccagaagctcaaggaacacggcgtcaaggctacgctccacatctatccgtcgggcggccacggctggggcatgaacccgaagttccgctattacggagactggcagaaagccacgctcgactggctctcgacgctgtaacgcagttgcaaaaacatgaaaagcctcgccggaaagcggggctttttgtatgcggtttgctccggatgccggcggcggggcagcatccggctgcaaccccgaccggcgatgcggcggagcgacgttatttctggcggaagatcacctcgcagtgttcgcccgtcatgtactcgacgatattgagcacctcttcgagcgagttcgaacgctggtagttgaacgcatagcgcttgtcgccgtaacggcccggcaccgaaatccgcacgccgtaggtcgtttcgatatgcgagatgatttcatgcagggtggcgttggccatcgtcaccagatcgtattgcgaaagcacgaggtgcgaagcgttcacgtgcgagatttcgaggttgtcggccgccgcgtcgtacagcgcgcgctggtcgggctgcaaggtgaccagattgacgccttcgggggtttgcaggcgcaccgagccgtgttcgaggaccacttcggcctgcccggagttctcgtaggcctgcacgcagaaagccgtgccgagcacccggacccgcaggtcgtcggtcgccacggtgaacggcgccgcttcgtcccgcgcgacttcgaagaaggccgcgccggcgagtttcacgttgcgctcggtcggactgaaagccttgggcagcgtcagccgggtgcgggcgttgagccatacctgcgtgccgtcgtcgagggtgacggtcgtcacggtttcggtattgttctcatagacccggtaaatgtcgggacctgcgaggaaatgccatgcgaatcccgcacacaccaccaacagtacggccgctgcagcgctcatcgaccagcgcagcagaccgcggcggcgacgggcacgctcctcgccggcgattttcgcgatccgggcgtcggtactgcgcatgaaggccgcgaaccggccgaggtcggcgctttcggcgaagacgttgcgggcgttccagatacttttaagctcgaaaaagtatttccggtgctcctccgactcctccagccacgccatgaggaactgctcctcccgatcgctggtctcccccgcaaagtatttattgatgactgcatccattataagcgtatcttccattttggttttgctacttactatacaatcctcagggtgaatctacccaaaggactgcgaattattacagaggaaaatgaaaaacaggagcatcagcagttccgatttcgacaatttcgaccgcagagccttcagcgcgaggtagatgtggttttcgaccgtactctgcgcgatgccgagccgctcgctgatttcgcggtgcgagaatccctgcaggtagctcagcgtgaagacctcgcggcacttttcgggcagagcggccaccgccgcgtcgatgccggcgcgcaggtcctgcgagtagatcttttcgatgatgggattgttgtcgggatcgtagtaggcgtatccgatgctttcgatccgctcctgatggtaggagcggtagttgcccgcatggcggtttttgttcacgtaattgaccgactggttgtagaccgagcgcagcaggtagccgtagagcgactgccggggatcgagtgtctcgcgccgaatccagacgtttacgaaaacgtcctgcacgatgtcctgcgcccagtttcctttcagaaagagacgggcgtaagccatcagcggcgcataataacggccgcacatctcgtcgaaagcctcgcggcttccgtcgcggatcgccgccgtgagccgggcgttgtctgtcggaatggattccatgtctacaaagatacataaatcttacgtattcgccactccgcacccggttttttcaccctcctgcaacaaaacgacggcgccggaacacatcgctgcattccggcgccgaagctgtcagaggacgaaaggcgtcagttcttgacgaccgaaatttcgtcgaggtagtagcggctcttcttggcacctacgctggtgaacatcagcttgtcggtaggcagcagcccctcgatcacgacgctgtgcgatttccacgccagttcgtttccggcatcgccgaccgcgatcgtatcgccgaccttgactttcgttccgtcgtcgtggaccacatacagctccatcgactcgaactggtcgcggcaccagcccgccttgaagacaacggccggggcggtggtcgaagccgcggtccagacgtttacggcggtcttgaaggtcaccgtgacattcgccgccgcagtgagtccgctcatggcgggcgtctggacatagctctggttcgcgttgtcgccgccgagacggaaactgccgcagaaggcattgtgaactccgttgcccgtaaccagcgcaccggtttcccagccgtcgtccttgaagaacatcaaccggtagggatcgccgtaggtgccgctgccggcattcatggcgccgccgcctgccgaccagtcggtgtaggtgaactcggtcagcatggtcgaaagcccggcctcgctggtcaccttcttggccgatttgacgccgacggcggtcatgacggcgtcgccgcccataaagcggtcgaagtcttcatagaacacttcgccggcaggggccgtgcggcgcgctacggtgcccgtaatgtcgttcgaccacgccgaatcggaatctgcggcgccggccttcaccctgagcctgtagcttgccgagggtgacagggcggccgaagcccactccgtgcctacatagttgaaggcgaaacgcagggggatgcttccgtatcccgaagctttcgaccagtcataggtgaaccgggcgctgcgggagggatcgccctcctcctcgatggccaccgtatattgcgagacgtctcccgcctgctcccattcgaggatgatgctcgacgtggttacggcggctatcctgacgtaaagcgtcttcgactgcagcgtcgccgcatcggagttgtccgcggcgagcgcggcgagcgccacgaccgagaagtcgtgcgaagtgcccgccgtcagcccggtcgccgtgaaggcgttgtccgtcacggtctgcggcgtgccgttatcgaccgtcacgctgtatcccgtggcaccggaaacggcgtcccatgtcagcgccacggtcgagaatccgggttcggccttcaggttggcgggtgcgtcgagcttgccctgcgaagcttcggcggtggttgccgaagccttggccgaccagtcggagtcggtggccgtgcggccggctacggccttgaccttggcgttgtatttggtttcgggcgtcagcttgtcgagcgtgcaggccgtgccgtcgatcttttcgaccagcgcagccttgctttcgtcggtgccgtcggcccagcaggcgaccgtataggatgccgcgccgctcacggcgtcccatttgagcgtcagcttgtcgggctgaacggcttcggcgtcgaatttcacgttcgccggggccgcgagctgctcaagatgcgtttcgccctcgcaggtgacgacgatgtcgtcgagcaggaagcgcgtcttgttggcgccggcctgcgccggattcgaggagaaggcgatgcgcgacgccggggtgagtccttcgagcgtcacggtgtaggtttcgaacctgcccacggcggacgagatgtcgaccgttttcgacacgaaggcggtgcctttcttgctcacgacgttgttcgagccgaattccgccccttcgacggcttcgacgacgatgtcgctgccgtagacgttttcgccttcggcataggcgctggccgagaagctgaccttgacggtcgtgttcgcgggcagggccgtcagctggggcgtgtagaggatgccgatgccgccgcttccgccgccgcacttgatgtagcccggacgggtggaggtgttgcccgacgaaccccagcccttcatgccgagcgcttcgacgtattcggccgacgtgccgcccgtgtggatgtggaactcggtcgcccagttgcagaggggacggtcgccgtccgcctgcggattcacgccctcggccttctcccacgtcttgcggaagtcggtgcccgaaacggcgttgtaaccggccgccgaattcacgatgtcgccgccgtggatgaaggcggagaaatcctgcgccagcacgatgtcaccggccttcgcgggggtgttcgcagcggctttcgggccggcttgggccgtggttccggccacgacgggagtctggatatcggcaaaactcaggttggtgatccgggcgtaataggtcgtttcgggatcgagccctgagaaggtgtagcgcacgacggggtagccggccagcgcggtgaagatgcctttgcccgacgagagtttgccgtcggcgagccagctgacgtagagatcggtgcaggcttcgtcgcggaaaagctcgacattgtagctgcgcgcagcatcggtcgccttgtcgtcggtgtaggaccactcgaaggtcagcgtcgaaccgctcgccgcatggagtttcagctgcggatcgaggtcgaggatgcccaccgaagccatcagcatggccggtttgtcgtgctcggtgacgtacacccagtccgaagtggcggagtaggggtagttggcccgcacgcggccgtaatagatccggtcggtcggcaggtcggtgaattcatggtagtcgatgtcggcggtagtcatgcagagcgcttcgctgacggggttcatgtcgccgtccacgagctgcacggtgtacgatgtcgcgccgcggacgaagtcccagcagatcgtgagcgacttgttgccgtattcgagcagtttcacgtttttcggggtcttcgacttgtaggcgtccgaaatctccacgccgtcgtccttgcaggccgtgagcgaaaccgcggccgagaacgagaacagggcgaacagaatgtatatgatgctttttttcatggttgttgtccggttttaatatacgagcttgatgtcgtccacataccagcggcccgccttcaccgtcgatccggagaaccagctgtcggccgtggagatgaagagtgacggattggccagcgatccggggttggggatgacggccgacacttcgacccacgtgtaggccgggatgtcgagcgaaacgtagctcttggtcgaagcgacgatcttgctgagcgtgcctttcgaaatccagaagccgtcgttcttctcgcagatgccgaccatgccctgatcgggtgcggcggcccagatgccgaccttgaaagtcagcagcatgtcatagcccgcgggaatgttcagcaccggggagatgatgttgccgggctgtccgtcggcgttgtcgctcgccgctccgaactgcatgtagccggggcacatgtagttgaggtaacccgtccagccctccatgccgatggcgcggtagaacgagggattgccgttgcgtacggtcgaggtgatgccgccgatgctggcgttggtgcccgccgtgacgctcaccgtctcgttgtcgaggctgaggttggcgacggtcttgtccgccgaggtcacgccggctttctggccgatgcagtcgccgccccacgggaatttgttgaagttctggaccagcagcggcgtctcttcgcccgcttggtcgaatccggcgcggacgatggtcgaaatctcgccgaagtccgtttcgacgcccgcggcgtcggtgactttcagcgcgaaggtcacgatgccctgtttggtcgcggtgcccgtgaggggtatctcgatgaagccgttgcccggcgaggagatcgaatagctgcctgcggccgccgtcagcccgttgccgcccgtctgggtcaccgaaacggtgtatttctccgtgccgacggccttgatgtaggggatgcggaggctggcttcggattcggcgttcagtttcagcaggcccgacacgccgaaccgctgtccgttgtcgaagggcttccattcgaagatgccgttctcctgtttgatggcgatggcgacgttctcctcgccgcagccgtgcaggtagatggtcgccgtgcgttcgtccgagacgttctggtcgcaggtgaccgtgattttctgataggtgtcggggctgccttttcccgacaaccggtccacgtgcacccagctgtaggcgccggtccactcccggctgtcgggcacatcgctgatataccagtcgcccgtggcgcgaatcgtaaacgtattgctcgattcgacgtacgagaaactcatctcgcgcaggttgcgtttgaggaacccgctgtcgtcgtcgctgcatgcagtcagaccgccgatccccgccagcgcgagaattatcgtcagtttgtgaaaaaatttcataatgattgatcgttagttttgttttaaaccgataaaaaaaatcagaaaccgactccgggtcctgccggacgtcaatttcctacgcggtttctaacgatatcgaatgacttgcacgacaaatatagcgaattttccggacttccaaataaaaacggcaaaaatttcacgaccttcccgcacgaaagtaaaatattgataaacataggtgtgaatatttaaattacaaaacgataaaaaaagggttttcgtttgggtagtttcctgcggtcgcttgtatctaatgcaaaccggacccgaaaagtccggccgccaaccgaaccgacagcaactgaaacacgcaatattaactgaaaacaacctaaaaaacgacccaagcgatgcctacctaatcaatcacaatcggcactacacggtttttatcggacgacggatgacttgcaaggttccgcagaccgtatgaaaacgaacacgctcaggcccgtcccgcagacggcgccgggatttcattttgcaccggccgcaggaagtaaccataattaaccgaattgaaactatgaagaatttattccataaaggactctgtctggtcatggcgctctgctgcatagcatttaagggctatgcgggaggaggaacgcttcccgacgcccaagggcacgacctgaagctgtcctattcccgaacgacgctcaaaaccgttgccgacgcgatcacgcagcaggtgggcatcgtattctcctatgaaatcgcactggccgattatccgatggagaacctctacgttacggaacagggggccgcgctcgacgccatcctcaaaacggtattcacgccccgcggcatcgattaccgcgtggtggacaaggtcgtggtgctgacgcgcagcgcgcatcccgcacaaaccgtcagggccgctccggccaaggcgcaggtgacgggcgtggtgcgggacgccgcaggcaacccgatgatcggcgtgacggtcacgatcaaaggcacgctggtcggcgtctccacgggcgtggacggcagctacaccattccggcggacaaggacgcgatgctgctcttctcgtacatcggctaccgcaatcaggaagagccggtggggcagcgcacccagatcgacgtcacgatgcaggaggaccagctgatgatggacgaagtggtcgtcgtgggttacggtacgctcaagaagcgcaacatcgtgggcgccgtcgagaatctggcgggcgacgcggtggagaaccgtccgaacgccgacatcacccgttcgcttcagggccagattccgggtctgaacatcgtgcagaccgacggtaaggccgcccacggaggtcaggtgaccattcgcggcgtgaacaacagcttcaaggcccgcgtcaacgacgggcagaaggagaacaaactcggacagggcggcagcgcgctggtgctcatcgacggcgccgagggcgacatgagctcggtgaaccccgacgacatcgcctcgatctcggtgctcaaggacgcttcgtcggcagccgtttacggcgcccgcggcgcattcggcgtaatccttatcacgaccaagaatcccgaaaaaggcaaggtgcgcgtgaattacaacggttcggtgtcgctgcaccgccgcacggtgatctgggaggacaacgtggtgaccgaccccgtgcagtgggtcgaggcgttccgcgaatcgtatctcaactcgtcgccgacggccaccgtcccgtcgctgttcaacaactacatgccttattcgaacgcatggttcgaagagctgaaacgacgccgcgccgatccgacgatggacaactacagcatcgacgccaacggcaactacagctattacggcgagacgaactggctcaaggagatttacaagtcggtgaactactcgaccacgcacgccgtcagcattcagggcggccgcgagggcgtgagctactacgtttcgggacgctattacaatcaggacggcatctacaaggtgggcgaggagacctacaagaagtacaacctgcgcgccaaaggctcgatccgcatccgcccgtggctgacgctcgacaacaacaccagtctgatgagcagcaagtaccatcagccgatgatgcactacggccagcagatgatctcgcgtcagatcgacatgttcgcctttccgttcgcgctgctgaagaaccccgacggcacatggacgcagaccgccgccaagagcggatacgcggccttcgccgagggtacttcgtggcaggaggacaaccggcttgaggtggccaacaccacgacgttcaacttcgaattcgtccctgaggtgttcaaagtctcggccgacgtgacctacaagggcgcacgctggacgcgcgaccgcatggagaacctctacacctactatacgggcgtgaacgtttcgggacaggacaacagctactcgtcgctcgaaaactggaactacatttcgaactacatctcgaccaacatcgtcggcaccctcacccccaaactgggacgggaccacgacctgaacgtcgtggccggatggaacctcgaagattacgactaccgcgcgcagaagacctaccggcagggcaacctctatccctcgaagcccagcttcacgctgatggacggcgagtattactcgaccacgtcgggcggttacacgtgggggctggtcggcttcttcggacgtatcaactacgcctacgcgggccgctatctggtcgagctgagcgcacgctacgacggttcgtcgaaattcccggccaactcgcagtggggattcttcccctcggcatcggtgggctggcgcctctcggaggagccgtggctcaaaccgcacgtggagggatggctcgacaacttcaagatccgcgcgagcatcggttcgctcggcaacgccaacatcgacccctatcagtacctcgaaacgatgacggccaccaacagcgcctcgatcgccaagtcgtcggtcatcatcaacggtcagaacgtgccttacacgtcggttcccgacctgattcccgacgacatcacgtgggagaaggtgaccacctacaacatcggtctggacctcgacctgttcaacaaccggctctcgttcacgggcgactactaccgccgcaacaccaccgacctctacaccgtcggtcccaacctcccgcaggtgctgggcagcgcggcgccctacggcaactacgccagcctgaagaccaagggctgggaggtcagcctcggctggcgcgattcgttcaagctgggcggcaagcccttcaactacagcctccgggccatgctctgggacagccgcagctggattacggactactacaacgagaccggcgacctgaccacctactacaagggcatggagatcggcgagatctggggcttccgcaccgcgggcatctacgccagcaacgccgaggcgctcaacggcccggcctacaacttcttcaagaacggcgagatgttccgcgcctacgccggcgacctgcggttcgtcgacgtggacggcgacggcatcatgaccaaaggcaaccgcacgctgtcgaaccacggcgacatggagatcatcggcaaccagtcgccccgctaccagtacagcatcaacatgtcgctgaactggaacggcatcggcctttcgatgctctggcagggcgtgggcaagcgcgactggtatccgtggaccgaatcgggcttcttctggggcaagtggaaccgcgcctacaactcgctgatgaagacgcagacgggcgacagggtagtgaagatcgacaagagcaccgacaactggcgcgtgacgaacatggacaagaatccctactggacgcgcatggtgtcgctcgccgccaaccgcaacgacggtccgctgacgtgggagaacgaccactacctgcaggacgcctcgtacatccgtctgaaaaacatcacggtcgattacaccttccccaagcacatatgcaagaaactgcgcatcgaggggctgaagatctacgtgtcgggcgaaaacctcttcacgcactcgccgatgttcaagtatacggacatgttcgaccccgaagtaatcaccagcggcgactccgacttcgcaagcacccagaaatcgggactcggcggcacgggtaacggctactcctatccgatgctcaagaccgtgacgctgggcgtaaacgtaacattttaaccgactgcaaccatgaaaaaaatcctattatacacgctgatgaccgtggcggccgcaggaatgaccgcctgcgaggacttcctgacgcgcgacacctacgaccagatcggcagcgacgaattctggaaatcggagaccgatctggagctatacgccaacggattcatccagaagatgatccccggcgacggaaccatcacgcgcggcgacatcgacgccgactactgcgccgtggacatcgccaccgacctgctgcgtcccgacggcaacgtctcgcccgacaatcagggcggctggaccgaaagcagctggaccaacctgcgccgcgtaaactacatgctcgacaacatgcaccgctgccggggccgcgtaagcgacgaggtctacaaccattacgaaggcgtggcccgcttctggcgcgcatggttctactacgacaaggtgcggaccttcggcgccgtgccttggtacgacttcacgatctcggccagcgacaaggaggctctgaccaaaccccgcgacagccgcgaatacgtcatggacaaagtgctcgaagacctcaccttcgccagcacctactgccttgccgacgccaagtacacgaaaggctcggccctgatcaacaagtgggtggcgctggccttcaagtcgcgcgtatgtctctacgaaggcaccttccgcaagtaccattcgcgcgagccgtcgtccgacaagccgtggcagaacgacgtctacaacgccgataacaagttcctgcgcgaagccgccgcggcagccaaggagatcatggacaaaggtcccttctcgctcgtgacgggcgacgtgaagaccgcctaccgctcgctgttcaccagcgccgggctgctgacccaagaggtgatcttcggccgcgaatacagcaaggagctttcggccttccacgaaaccagctggtattactattcgccgacctacggaaccaagatcgccatgaccaagaagttcatgaacacctacctcacgaccaagggcacgcccttcaccgacatcgacggctacaagaccgtcgacttcatccacgaattcgacggccgcgacgcccgcatggcgcagacggtcatcagcccctcgtaccagatgaagatcagcggccgcacggtgccctattcgcccaactggaaggtgacccgcacgggctaccatccgatcaagtggtcgatcgacgacgatgccgacaacgtgctttcgaaggcggccagctggaactcgctgccgatcatccgttacgccgaggtgctgctcaactatgccgaagccaaggccgagctgggcgaaatggacgccgccgtctgggatcagaccatcgcgccgctgcgcagccgcgccggcgtgacgtcggtcatccccgccaaggccgatccctacatggaggcttatttcctcaatacggtgaccgacaaatggattctcgaagtgcgccgcgaacgaggcatcgaactttgtctcgaaatgggtctccgctgggacgacgacatgcgctggcacatgggcgacctgctgacgagcgacaacaacccgtggacgggcatctacatcggcagcacgagctatacctacgactacacgggtctcagcaccgacgacaacggcgatcccgtgcccgacttctacatccgtccgggcgaggacaccaaacattcgatcgccatttcgaatacgggcgccaaccagaccttctcgctcaacggcgagggcaacatcgtctgggaataccggcgcgtatggagcgaaaagaagtacctgcgtccgattccgctgacggcgatcacgcgcaaccccaatctcgaacagaacgcgctctggaagtaagaggacaataaaaacgacaagatatgaagacaagaatcatgttattctgctgcatggcggccgcgcttctgctggcgtgcagcaacgacaaatcggacggcgagggccgcgaacccggcgtcgagaccgagcttaacggcacgcagctcggcgagggcacgaccctctacggactggtgaccgacacgtcgggcaaccccgtgcagggcgtggtggtgtcggacggctacaactgcgtggagaccgacgccaacggcgtctatcagatgatccgctacaagaaggcgcgcttcgtctggtacagcacgccggcagggtacgaaatcaacacctcggcggacaactatccgctgtactatgccgaaatcgtccacaagaacatcgccgaccgccacgacttcgtgctcaagccgctggccgctcccgaaaccgacttcacgctgctctgcatcgccgacccgcagtgcgccagcacggccgacatcagccgttacgtcaacgagaccattcccgacatcgaggcgacggtcgaaacgttcaaggccaaagggcgcgccgtgtacggcatcacgctcggcgacatcgtcttcgacacacccgacttgtggagcaacatgaaggaggcgatggccaaccgcaacctgacgatcttccagaccatcggcaaccacgaccacctgaagaccgagacttcggacgacaaggccgccgccaacttcgaatcgcagttcggaccgcgcaactactcgttcaaccgcggcaacgcccacatcgtctcgatggacaacgtcttctacgtcggcggcagcaccccgtcgagcaactacaagggcggcatcaccgaccagcagctcgaatggctccgtcaggacctgtcgcacgtggcgaaggacaagctggtgatcttctgcgcccacatgcccttccgcggcggcacgagcgaaacggacgaaagccacatgaatcacgccggggtgctcgacctgctctcggagttcgccgaagcgcacatcatgatcgggcacacgcactaccagcagaagtacatccacacccgcaacggcaagaagatcttcgaacacatccacggagcggcctgcggcgcgtggtggacctcgaccctctgcgccgacggcacgccgaacggatacggcgtgtatgagatttcgggcagcaccgttcccaaccagtattacaaagcgaccaacaaggccgccgaccaccagatccgcgcctactcggccaagcaggtgttcggcacctccggcagcacgacgttcggcttcgccgccaacgcctcggccatgaacgacgcgaagtgcatcgtggccaacgtctggaattcggacacgggcggcgactggaaagtgtcgctctggcagaacggcgcgaaggtgggggatatgacccgcatttcgacctgcgactactgggcctacgcctaccacgtgctctacttcagcaagagcgtgggcagcacgtggggcaagaagctcgaccacttctattacggcaggctgacctccgggacgcccgaaacggccgatttcgagatcgtcgtcgaggacggcatgggcaacacctaccgcacgtcgaaacttcagaccgacttcatcggattctgattccggcctgcaaaaagcgatgccgcgctcctttcggggcgcggcatttctttcatgcggaaatccgtcagcggagtcccagcttgtccatcatcctgaggggatagttcgtgatgccgtagacatcgctgcggatgccctgataccactgcatctgctcgtcggtgtcgatctgccacaggctcagccgcaccttgttttcgggaaagctcttggcccgcttggtgtccagcccgaaatcggcgagcttcatgttggcccacggaatgtctctggcgatgaagtcgcccggttcgtaggccgccgctccgtacgacacggaccacgccgagcggaccgcgggaatcaccttgtcgcgtatggcaagacggccgacgatgaatcccacgaaattcttggccctcttctcgtggacgatttgcgcggcggcgatgccggtccggctcgcttccgcattgccgcccgcctcgtcgccgagcgtcttgacgtcgatccacaactgcgtgcagccgccttcgagcaccacgtcgatgaactcctccagcagcggcagtttctcgccgttggccagcgtgcccttggcacacagctcggcataggtggcgtccttgaagcaggtgttgccgaggtaataatcgtcgtggtagacgaccactttgccgtctttggtcaggtggatgtcgcactccgaggcgaagagcttcatctcgacggcctttttcagcccggcgacggagttctgcggaaatccggtctcggcataacagccgcggtgcgccacgaccttgttatcgacgggttcgggttcgggatagaccgccggttcgcccgtctgctcccaccaccagtcgggcagcggttcgtaatcgtcgtcggagcatgccgccagccatacgcaggccgcacagcacaccatcagcagatatttcagctttttcatcgttcttgtcgtttttggaccggggagcgcccttcggcgggccgcaccccggtcggttgattacttcttgactttgtagtttttcacgcagcggatgcccacagccgggttgccggcgtcgaggttgtcgttgaaccagtagttgctcgtcgccttgacgttgttcagacgccacgtcttcttggccgaggagccaatcagcggcacccacgaatgggccgtgtcgccgtactgcccgtagccgttcttgttgagccgccatccggtcggatagaggttgaagtcgaaggcgtcggcgcccgcggcacgggcgggagtgctcgtccagccctcctgcgtgcggagccacggagccacgttgttggcgttggtggcgacgagtttggcgatggtcagcatctcctcccggacgggataggtcccatcgccgcgcgaagcttcgagcgcagcataggccaggtcgtaccagtcgcggaagttggcgatatgccagccgtaggggcagatgccctgaatctgggccgagagcgccggattttcggcgaagaaccgctcgtcgtcggtcacggctttcatctccgcggacttgaagacgcgcgccgtgatctgcgtgccgacggcatcgacgaatgtcgaaccgacattgtaggccgaaggccattcgatcgaggtgatgccgcggcccaatccgccggcgggcgtgcccagcaggatttcatcgagcgtatagagacgtccgtgacggtccgtgacggcctgatcgcccttgaccgatccgccgctctcctcttcgtcgtaggcgggattgcgctcgatgtaggggtcttggggatcgtagccgcccgacgtcgccgagccggaataggccggcaccagacgcgaccccagtttcatcgcgccgatctccggaccgccgttccagttcaggttgcgggtcatccatatcttcacgccgccgtccttggtccggaacgccttcgacgggcaggcggccgccgcgtcgtcgggcatgcagttggcgatcgctatgcgcgacagggtgtaggtcatcgcattgaggtcgatggtcagcgtacgcatgccgtcgatgtcgatcgcaggccccgcgggaaccgcatccgccgccgaattgagcgtgacgatccgcccgtcggccgcaagcgcgtaagcggggtagtaatcggcgcgcagcacggtgttgacgcggatttcgggtgcatttccggcagtgaaataggcgtcgaaacggtagacgcccgtctcggacttggtcatgcgccgggcgagttcgaaccggtcgtaatcgaacagcgacgcaccccagacatagcagtagaggtctttggccagctgcgtgacaggaatcttcgccgtggcggcgctcgtctccccgctgccgaccgtgatatagacgttggccgtgcgcggctgctcctcgtcgtcccacggcgcggccgtgaagcggatcacgttgccgcccaaatcctcccacgaaatccagtcggcgtcctcgtctctggagaccgcatagacgtcgcccatgttggtcgtgaagctgacatcgaccgggacgatctcgtcggcgttgaactcgatctgcttcgggtccaccgtgacttcggcgtcggggtagacgcccgtctgcacgacccggagcgtctcctgcgtgccgtcggccgccgtcagggtaacggttgccgtgcgcttgtaggccgtattttcggtcgcggtgatccggaatccgcggtgcgtgacgccgtcggcgtcggtgacgctgcactccgtcagcgtgcaccacgtttcggttttgtccgtctcggcgctccatgccatcgacctgcgtgccttggggttgagcgtgacgatgacgttctgtccctgatcctcctcggcgttccgcccggcgttgtcgagggtcacgacttcgggcgagaaggcgatgcgtgtggcctgcacgttgttgtccatgtcgtcggtgtccgccagcggattgcaggcgcatgcgagggccgcggcgacgagcgcaatataacagttgattttcattgtcgttcgtttttcgggttatgtatcaataccagccctccgtctgtttgagcttggaattcttgatgatggactcctgcgtgatgggccacaggagaatgttggcgttgctttcgcgcttgtcggcgacatccttgttgtactcccagaccgcgtccagacggatcagcgtccaccacgtgcgcccttcgccgaccagctctttgagactctcctcgacgatggcccgttttacggccgcctcgctctgatcggtgtagtgggcggcgttgccgtaggcgcgcttgatgatttcgcccagcgccgtcagcgccccgccgtagtccttccggtagtatttgatttcggcatccatcaggaaggcctcggcatagcggtagaggatgaagtcggagtcgaaaatgcgcgcgccgcttatcatctgcccgacgcccttttcggtccactcgatcgacttgatcgtcgtgccgtaatcggccctgttgtaggtcagcttcgtgcgcgtatcgccctcgaccgaggtcagcagcgccttgtagcggtcggtgtaccaccaccactggttgccgccggtgatgggcacagggttgttctggtaggccgcttcaacgtagttgctgttccagccgaggtaataccccggtccgttgacggcttcgccgttggcctgatggacggcgaagatcacctccttgttgagcttgttggccgaggagaagacctgagcgtagtcgctttccagacgcgacgccgagaggttcagcgcctcgatggccttctcggccatggtgaggtacgacgaaccgcctccggcgacgcggtacatccacagcgcgtagtcagccttgagcatctgcaccgcggcgggcgtggctacggccttgtccgaattgtcggtcacgtaccgctcggcttcggtcaggtcgctttcgatccgggcgaaaatctctgctttcggcgcgcggggcaggtagaggtcgccgcccgtggattcgtaccccgtaagggccagcggagcgtcgccccagatgcgtgcgatccagaaatagcaccatgcgcgggagaaataggcgttgcccagactgaaattgcggaccgattccgaaattcccatctccggcacgtgcttgagaatcaggttggcctgattgacggtcttatacatgacgctccagtcggcataggcgttgctcgaagacatggtgctggtgcgcacctgcgtctggtccacgcccgacagcgttttgttcgtgcccgcgccccagagaccgttgcgaaattcaccccagcagaggtagatgtcgtgtacgctcttgagcgcgtcgcgcatgtagaggtagatgccgtaggtcgccgtctcggcgtcgctttcgtcgatccacatgttgctggccgagagcttgttgtcctgcatgatatcgaggtcgccgtggcagccgctcatcgtgcacgccgcagccagcagggcagtcagtatctttttgcatttcatggtttggtagttttaaggggttagaacgtgaatttggcgctgaacaggatcttgcgcgcgggcggataggggctgaaacccgtggcataggtcgaagccgaattgtagagtcccccggtggtcgccgcttcgggcgatacgccgtgcacggccgtccagtagtagagcgtgttgcccgaaacggtcagggtcacgtctttcatgcccagccggctcgtccagcgcacgggaagcttgtacgaaagcgagatgtcgcggatgcagaggtagtcgcccttctcgacgaaaacgtccgacatgcgcgagaagttgcggttgccccagtcggggtcgttggccgtgaaacgggcgtacttggtcttgtcgcccggctgcgaccagcactgcttcacgtcgttcaccaaattccagttgcagttgcccatcgtcgccatgaagtagcgcatctgcatctcgttctggatcgagtggcccagcgcatagtccatatagatattcagcgaccagttccggtaccggaaagtattgccgatgccgccggtcgagtggggcgtggcgtagccgagcaggaactggtcctcctcgttgatgatgtcccggccgtcgcgctgcgtcgatcccgcgcggttgacccattcgtagtcgccgatgtccttgcgtccggcgatctgcctgcggtccgagcggcggtatccgcgcgacgaagcgtcgtacatcgccgcatcggcgtcggcctgcgtctcgatgatgtgatcgaccttgtaaccgtagatgcggcccatgcgctcgccctcggcgatgcccccgaactggctgccgtcgccgatggtgatgccgtccatgcggttgcgcacgttgccgttgtcgggcagcttcagcaccttgttcatgttgaagttataggtgaagtcggtggtccacgtgaagtcgccgcggctgatgttgaccgacgaaatcgccagatcgacgccgtagaagcggaccttgcccacgttggagaccaccgaaccgtaaccggtggtgttgggcagcgtcacgtcgaacagcaggttgcgcgtcactttgtcgtaatagtcgaaactcacgcgcacccggtcgtcggccagccccatgtccagaccggcattgacctgcgtcgtggattcccatgtcaggttgctgttcggcatttcgccggtcgtggtggtggacatgccgttgtactggtacgccgagttgtaactgccgtaggtgtcgtaaagcccgatgccgttgttgcccgtcagaccgtagctggccctcagtttgagcgagctgaccaccttgttccgcggccagaacgcctcctcgtccacgatccagccggccgaagccgccgggaagtaaccccagcggttgcccgcggcgaatttcgacgagccgtcggcgcgcatggtgaacgacagcaggtatttctcgcggaagttgtagttgacacgtccgaagtaggagatcagcacctcgtcggtccgcgtgctggtcgggtagttggtgatgttggaggtcccgacgttcagcgtcggaatcttgtccgatgccgccccctgcacgcgcgcgtcgatgctgttgttcttgtccttcatgtagtcgtaaccggccaccacgtcgatgttgtggtcttcggcgaaggttttcttccagttcaggtaggtctggaagtccatgcggttggtctccgtgaaggcctctttcgtgggccggatgttggtgcccgtcgtggggttgttcttcacgaagaagtggctgcgcgaatggcggttgtggttcgagaactgggccacggcgcgcaggccgtccacgatcgcccattcgaggttgatgttcacgctcgaccgcttggtcgtctcgcccgtatcgctgtagtaatagttgtagtaggcggcgggcagcgtggtgttgttcggccccatggcgggcgttccggccaaatcctccccggcttcggcgtcgtaccagtcgcggtgggtggcgggtaccgaaaggccgcggatcaccgaattgcgcttgttgagcgcccctccgtcgagcatctgccgctcgatctgcgaatagtcgaaggtcgtggtcgccgtcaggcgtctggtcaccttgaacgaggtgttgccatggaaggtgaagcgggagaatccggtggccatgccgatgccgccgtcgtccgtataacccgccgacgcggcataccggatgttctcgccgccgccgttcacgccgatatagtagttctgccagaaggcgtcgtcgaaccactggctctgctggtcgttgtcttggaaaacgatgatcttgccggggttcaccgggtcttcgatccatttgtagcctttcggcagcgattcgcccggattgaggtagcgcgtcgtccagcgcgaagcggcgctgttgccggctcccgccgattcggcgccgtcgagaatgctgagcgggtccgcgccgccgcagtagccttcggcgatcgccgggcgcagcgtgagcaggtaatcccggccgttcatcaggtcgaacttcgtggccggactctcataggcccactgcccctcgaaaacgatctgcggtcccttgtggggcgcgcccttcttggtggtgatgagaatcacgccgttcgatgcgcgcgaaccgtagataccggccgacgcggcgtccttgagcacctcgatcgactcgatgtcgttcgggttcaggcccgccatttcgcgtacggcgccgtccaccagcacgatcggatcgttggagttgttgatcgacgaaccgccgcggatcaggaatttcggcgccgaacccggcgttgcgtcggtcgtggcgacctgcaagccggcgatacggcctttcataccgtccccgacgaggttcacgggcatgctttcgagggttttgccgtccattttcgagatcgccgaagtcacggtcttgcgcgtctgcgtgccgtatcccacgaccacgacctcctccagcaccgactggtcctcctgcatcgtgacgtcgatcatcgaacggcttccgaccggctcttcgcgttccgtgtaaccgatgtacgagaagagcaggaccgcgccgggctccgcctcgaccgaataggtgccgtcggccccagtcgtcgtgccgcgcgtggaatccttcaccagcaccgtggcgccgaccagcgggcttcccgccgcgtcgcagacacggcccgtcacgctgttcttccgctgcggctccgcagtgcggtcgtatgtcagcacgaccgtgcggtccacgattttgtagcggaatccccgtttggtgaatacgttattcagaatccgctccagcggggcgttgctctcgcgtaccgacacgtcgcccatcggcatggacgccagcgccgattcgtaggagaaaagcacgcccgtctgcttggtgaaagcgtccgtaaaagtctgtagggtagcggacttgaccgttaggtccacatcgtggtttttccggaaaggggagcctccgtcgtcttcggcataggccctcaggctcaagccggtaaacaaaagaagcatcgccactccccaacggaagatggaatttttcttcatgattttaaggtttgcgaaaaaggttaatttgggtgaaaagccccgtccgcggcggccgtccgcggacgggacagaggatagctagttaccgcgcacgacctcgcagcgctgtccggtcatgaattcgacgatgtcgatgacctcttcgagcgagttggtgcgcaggtagttgatgtcgtatcgtttccggttgtcgggatcggctatgcgtatccgcacgccgtaattcgattcgatgcgggcgatgatttcgccgatcgtggcgttcttcatcgccacgaggttgtaacgctccgtcacgaaatgctcggcgtagatctcttccacctcgatgtcgtccttcgcggcgtcgaacacggcccgctggttgggatggagccgcacgagattatagccttcgggggtctgcaggcgcaccgaaccgcgttcgagcaccacttcggtcagcggatcggcggcatgcgccctgacgttgaacgccgtgcccagcacccgcaccgacaggttttcggtcttcaccacgaagggatgcgcttcgtcgtgcgccacgtcgaagtaggcttcgccgtcgatgcgcacgatacgctcctccgaccccgcgccgaccgcatattgcagttcggtcccgtcctgcatccacacctgcgtgccgtcttcgagacgcagggccgcaatttcgccgctttcattcagataagtacggaacagctcgtcccccggcgtaccgatgctggcgaaccacgccgcggttacggcgacggcgaccaccgccactgcggccgcagccaacgcccagcggcgccatgcgggacgccgccgcttcacctcgcggcgcatcgcttcgtcggcgtcgatccgcgcgttgagccggcgcatcatggcgtcgcagcgctcgccgagctgtttggacgaaagggttttgtgggcgctccagatcgcggcgatctcgaaatagaaggtgcggtgctcctcccgttcttcgagccatgcgtaaagccgccgctcttcggcctcggtcgtttcgtgattcaggtgcttgtataatacagaatcgatgctgtacaatacggtgtcgtcggtgtgtgccaatgcgtatcttttttaggtgcttgcataataacatacaggcaccccggagaaaatacctactcggtacggcaaattttttcctatcgcatgaacagcagggcgagcagcaacagcagctgctccttggagagcttccggcgcagttgtttgagcgccgcatacatatgattctcgaccgtactttgcgagatgccgagccgttcgctgatctcgcggttcgaaaggtcttcgaggtagctcagtctgaatacctcgcggcatttgggcggcagcgactcgatcgccgcgtcgagactcgcgcgcaggtcgtcggaatagagcttacggatgatcggactgttgtcgggcgcatagtaggcgctgcccatcgaggcgatccgctcctgatagtaggcgcggtaatcgccggcgcgcctgttcttgtccagatagttgagcgcgcggttgtaaaccgaacgcagcagatatttatacagggagttcgaatcgtccagcgccgcgcggttctgccacacgttgtaaaagacgtcctgcaccacgtcctcggcccagtcgtccttcatgaaaaggcgggcgtaggagaccagcatggcatagtaccggccgcaaagttcgtcgaaagccttgcggtcgccgttgcggatccgtgtcgtaagcagaattttctccatcggacaatctgattcgccacaaaagtaaacattctgaatttatgaaacaatcccccgtgttatttttaatttttttgtaattccgttaggtggtttcgtccgatcggttgtatttaatatgtcacaaccgaactacacgaccgatgggaaaaaacctctttccggcgccggacgccgcagcgcagtccccggcagccatgctccggcagtacggcggcacctgccgccgcgttttcccatctccggcgcagacacatcatgcgattctgataatcatcaatcatagatagaatgaaaaaagctattcaattcggagcgggcaacatcggacgcggattcatcggcgccgtgctggaaaaggcgggctaccatgtggtgttcgccgatgtgaacgaacagatcgtggaccggatcaaccgggacaagggctacacggtgcagatcatggacaccgtatgcgaggaggtgcgcatcaccgacatttcggccgtggattcgcggagtcccgaactcgcgcagcaaatcgccgaagcggagatcgtcaccacggccgtcggccttacgatcctgccccgcatcgcaggagccatcgccgcgggcatcgaggcccgcagggagcagggcgtcgagcagccgctcaacgtcatcgcctgcgaaaacggcgtccgcgccacttcgcagctcaaagccgcggtgctgacgcacctcgacgccgccggacaggcctactgcgagcagtacgtcggcttccccgactgttcggtggaccgcatcgtgccgcccgtcaagagcgaaaacccgatcgacgtggtcgtcgaacgcttcttcgaatggaacgtcgagcgcgccgcattcaagggagccgtacccgaaatccccggcatgaatccggccgacaacctgatcgcctacatcgagcgcaagctcttcacgctcaacacgggccacgccattacggcctatctgggccgcatgaagggctacatgaccatctgccagagcatttccgacgagcagatccacgccgtcgtcaaagccgccatgcgcgagagcgggcgggggctggtggcgcgttacggcttcgaccgcgacgcccacttcgcctatatcgacaagatcatcggccgctttacgaacccctacctctgcgacgacgtgacccgcgtgggccgcgaaccgctccgcaagctttcggcgggcgaccggctcgtaaaaccggtcctcacggcccgtcagtacggcatcggcacgcccaacctgctgctgggcatcggtgcggccctgcactacgacaatccggaggacccgcagagcgtggagatgatcgccatgaccgcacggctcggcgcggcggcggccgtagccgaaatcgcggaactgcccgccggcgatccgctgcccgcgctcgccgcgcaggcgtacgccgaagtagaacgaatcatccgctaatccccgcctgcgacatgaaaaacacgaaactgctactgctggccgcatgctgcgccgcaatcatgcccgcctgcgcccaagccccccggctgcacaccgtgaagatcaattcgatcgaggagctgcaggcctatttcacctacgatcccgcgcgcgacgtgatcgtcagcggccaccgcggcggcatgatgcccggctatcccgaaaactgcatcgagtcgtgcgaaaagacgctgtcgctgatgcctaccttcttcgaaatcgacttcagcttcaccaaggacagcgtcatggtgctcatgcacgacctgacgatcgaccgcacgaccacgggcaagggcctcgtcgccgactacacctacgacgaactgcgccgcctgaacctcgtggaccgcgacggcaaagtcacgccctataggattccgcgcctgaaggatgtgctggagtggggcaaggacaaggtggtcttcaacttcgacaacaagtacatcaacaccaaaggcgtgagcgacgaggtgcgccgcgcgagtctcgactactatatcaggcagctccggcccggcggcgagtggtccatgtaccacaacatcatgctgagcgtccgctcgatcgaagaggcgctctactactggaaccacggtatccgcaacgtcatgttctgcgtcgaaatcagttcgatggagcacttccgggcgtacgaagcttcgcccattccgtggaaatacatcatggcctatatccgtctggcggtcaatcccgaactccaacaggtctacgatctgctgcacgccgagggcgtgatgacgatgacctcgatcaccggatcgtccgacaaggtgaagaatccccacgaccgccgcgtggcctacatgcgcgaactgctggccgaacccgacatcatcgagaccgactatccctccgaattcatcggcctgccgtggtcgcgcgacgcgatccacgccctgcaggacgccgccatccgcggcaacagaagctccaccgacctgaagtaaaacccgaaccaacctgaataaatgtctgtaaaacaactcaatccggcatatgccggcatgaccgaccaacaggtcaaacgtttcaaatactgggaattccgcaccatggcgatgtgcatcttcggttacgcgctcttctatttcgtgcgcaagaacctgagtatcgccatgccgtatctcaacgaggagatgggcatttcgaaatccgacctcggcctcttcctcacgctccacggactgatctacggactctcgaagttcgtcaacggcatctggggcgaccgcagcaacgcacgctactttctggtcacgggactcgttttctgcggcatctgcaacctgctcttcggattcagctcctcggtgctggcgctgggcatcttctggattctcaacggctggttccaaggcatgggcgtcccgccctgcacgcggctgatgacccactggatcgtccccgaacggctggcgaccaagatgtcggtctggaacacctcgcactcgatcggcgccggactggccatcatcttctgcggctatgtcgtcagcctgaactggggcgcatggttcgacgcttcgtcgatgctctcgcagcactggcgctggtgcttcctgctcccggcgacgatcgccctgctgggtgcggccgtcgtctgggccttcgtccgcgacacgccctcgtcggtgggccttcccgaactcaagaccggcaaaacggccgaaaaaccgcagtccaaagcggaggagaaggccgaatacaaggccttcctgcgccgcaaggtcttcctgaatccgacgatctggatcatcgccgtgggcaacttcttcgtctacatcgtgcgcttcgccgtgctggactggggaccgacgatgctcaaggagcacctgcacatggacatcagccatgcgggctggaccgtcgcggcgttcgaaattgccggtatcgcgggcatgctggccgcaggctgggccaccgaccgtttcttcggcggccgtgcgccccgcacgtgcgtcatctgcatgctgatggccgccgtgtgtctggtgggactctattcgctcaacgagcatacgccgctgatcgtggccgttgcgattctgatggccgccggattcttcatctacggcccgcaggcgctggtcggcatcgccgcggccaatatcgccaccaagcgcgccgccgctacggcaggcggtttctgcgggctgttcggctacggcagcacgatcgtttcgggctggggactcggcatgctggtgcagtacaccgactggagcatcgcgctctatacgctggtgggcatggcgctcgtcggcacggcgatcttcgccgccgcatggaaagccaaacccaacggctacgacgactgacacgaggttttaggttaatgataatgtgtgagcgaaatccccgcagccgcgtacggctgcggggatttccatgttcagctattttccggtgccggggctattccaccgtcacggacttggccagattgcgcggctggtccacgttgcggcccttgtttacggcgatatagtacgccagcagctgcagcggcaccgagacgacgaccggcatcaggcagtcggttatcaccggaacctcgatcgtgtaatcggcgctgcggcgcacgtgcgtatcgtcgcgggcgatcacggcgatgatcttgccgccacgggcgcggatctcctcgatgttgctggccgttttttcgtaggtattgtccggcgtggcgatggcgaccgtcggcatttcgttgtcgatgagcgcgatcgcgccgtgtttcatctcggcggcggggtagccctcggcgtgaatataggagatttccttcagtttgagcgcgccttccatcgccgtggggtagttgtagccgcggcccagatagatgaaattgtgggcgtaggtgaagatcttggagaggtcttcgatccgcgggccgagcttcagcacctcttccagtacggccggaagttccagcaggcccttcgccacctcacggtagtactcctccgtcacggcgcccttctcgcggcccacggccagcgccagcatcgccatcacggtcacctgccccgtaaatgccttggtcgaagccacgccgatctccggtcccacatggatataggcgcccgaatgggtggcgcgggcgatcgaggagcctacgacgttgcagatgccgaagacgaaagccccggccttgcgggccagttcgacggcggccagcgtgtcggccgtctcgcccgactgagacacggcgatcacgatgtcgtcctcgtagatgaccggattgcggtagcggaactccgaagcgtactccacttcgaccggaatccggcagatattctcgatcaggtgttcgccgatcagcgccgcgtgccacgacgtaccgcacgccacgaagatgatgcggcgggcttggaggaatttcctgcggttgtcgatcacgccagacaacttcacctcgcccgtttcggggttgatgcggccgcggatgcagtccacgatggtcttgggctgctcgtaaatctccttgagcatgaaatgcggatagccgcccttttcgagctgcgaaatgctcatctgcagcttcttgatgtctattttgccttcgtggttgtccagcgtgacgattttcagcggcttgttgcggttgataacggcgatctccccgtcgttcacgtagacgaaatcctgcgtatactcgatgatcgacgcggcgtcggaactgagaaagtactcgccccgaccgatgccgatggccatggggctgctctggcgcgccgcgatgatctcgtcgcggttgttcttctcgaccacggcgatagcataggcgccgaccacctgacggagcgcctgctgcacggcttcgagcagcgaacaggcgttggtcgagcggatatattcgatcaggttcaccagcacctccgaatcggtgctgctgcggaacgtgtagccgttctcttcgagcgcatctttcagcacccggtaattttcgatgattccgttgtgtatcagggcgatattctccgactcggagcagtgcggatgggcattgacgtcgttcgggacaccatgcgtcgcccagcgcgtgtgcgcgatgccgatatttccgcccagctccttccccgcgaggaaatgttcgaggtccgagaccttgcccttgcatttgtaaacgttgagcgcaccgtcctcatcgaccatcgccacacccgcgctgtcgtaaccgcggtattccaaccggtgcaaacctttcaacaggatcggacaggcttcgcgcccgccgacatatcctacaatcccacacattgtatatttgtaattagttaattaaatttgaatagttaagacatcagagtatggaataagtccgatctctcattggttttctaaaccgggaattatgttctgaccccatactctttacatcagaatccggatagttcgtaaggtgtctgagcccgtattcgcaatgaaggaccaagatgtaagcgatgtcgttaaaaccaaaaaatgaacggccatgaggtacattggaatcgacgtgagcaaggctacattcgtggtagcttactcctccgacaaaggcggggagatccgtacttttaacaacacgaccgctggtatcagacagtttatcgggactctccccaaagacggcagtatccactgtgttatggaggcgacagggaattacagcgccttgctgctgtatatgctcaatgtcgccggaattactgtcagcatggagaatccgctgaaggtaaagaacttcgccaaagccttgctctctacggtcaagaccgataagagcgatgcacgactcattaccttgtacggagagaagatgaacccgcgtcctttcaaggtacagggagaggccatcctgcggctccgacagaaaagaaccgtcattcgccaacttactaagcagattaccgccatgtcgaaccttcgtggctctcttgcatgtctgcctgtcccggacaaaggtgcaactcataccgtagacgaaactatcaagttccttgaaaagaagcgtgacaggctccaggcggaactcacggatcttgtcgaagtggagttcagccgacaactcgcgctgctgacgaccatcaaagggataggcataacgcttgccacggcgctcatcatcactactggaggctttacctacttccaaaatgccaagcaggtgtcccggtatctcggaatttgtcccacttacgaacagtccggaacttcggtaaacatcaaagggcatatcaaccgaaacggagacgcatacactagaggacttctctatatcgccgcttggcctgccagtaggttcaatgcccaatgcaaagagacctatacgaggctcaggcaaaacggaaaatcgggaaaactcgctatgatcgctgtcgcaaacaagctcatcaggcaggcttttgctgttgtcgcgcacgataaagagtatatcgacggattcgtctccaacagaccttagtaggaaccattctccgatattattactctttttccgcattttttaatatagttcgtaattctttcagcatttttatcccgtcaaaaataagaaaatattttaaaaacgatattcggacaccccgaaataagaaaaaaagcaccgaaaccggtgcttaaatgacatatttcagaatctcccgcacgagcgtttcattgcccgcggcctgcgacactccgcggtcgggcctgaagtccgcaacgacgcccccggcctcccggacgatcagattcgcggcgcacacgtcccactcgtgcagatccagctcccaataaccgtccagaagtcccgccgcgacacagctcaggtcgtaggccgccgaccccagccgccgcacgtcccgcacgtaggggatgatgcgcgcgacgttgtcgctgttgttgtccggattgacgtccttgtcatacggaaatccggtggcgatgaccgacgtggcgagggtctgcttgtcggagacgtgcagccgcttcacctcgcctgagcggctcttcatataagccccgccgcctttcgacgcccagaacagctcgttcaggtagggcgcgtagacaactccggcgatcgtctcgccccggtattgcagggcgatcgaaaccgagaaaacaggaagcccctgactatagttcgtcgtgccgtcgagcggatcgaccacccagcggtaatcgctcccggcacgccccatcgaaccgccctcctcgcccagtatctcatggtcgggccagcgttccagaatcgccgcggcgatgtaggcttcgctctccttgtcggcgcgcgtaacgacgtcgtagacattggatttcgtgcggatcgccagatcgtcgccccggaagtaggcgagctggatctttccggcgccttcggcgagcggaaagatgaaatcgagaaattcccgatacatggccgcgcgctacttctgctccgcgaaatacttgtagaacagcggaatggtctcgacgcccttgtagaactgttcgagtccgtagctctcgttgggcgaatggatcgcgtcttcggccagtccgaagccgatgagcagcgacttgatgcccagaatcgactcgaaaccgctgatgatcggaatcgagccgcccgaatagaagggcaggggtttcttgccgaaagtctccgccacggccttctccgccgccttgtaggccggcatgtcggtcggcgcgacgtagggcatgccgccgtgcagcgacttgaccgtgaccttcacgctcttgggtgcgatcgatttgaaatatttttcgaacagcttgctgatcttgcggtaatcctgattcggcaccagccgcatcgaaatcttggccgacgccttcgacgggatcaccgtcttggtgccctcctcgatatagccgccccagatgccgttcacgtcgagcgacggacgcacgcccgtacgttcgagcgtcgtgtagcccgcttcgccctccacgtcgccgatcgagagcgacttcttgtaggccgcgaggctgaacggcgccttgttgaaggccttgcgctcggccggagtgagttcgcgcacgtcgtcgtagaagccgggaatcgtcacgcgcccctcagcatcgaccaactgcgccacaaggcgcgtcagcacgttggcgggattggcgaccgcaccgccgaacagccccgaatgcaggtccttgtcgggtcccgtcacctcgacctccatgtaagccaagccccgcaagccgcaggtgatggagggggtctgcatcgagatcatcgaagtgtccgataccaatataatatcggccttgagcatctttttgttctgctcgcagaatttgtagagactcggcgagccgatctcctcctcgccctccagcatgaatttcacgttgcagggcaggcactcctcggcgcacatcgcctcgaacgccttggcgtgcatccacagctggcccttgtcgtcgtccgcgccgcggctccagatacggccgtcgcggatgaccggctcgaacggctcggtccgccactcgctgcgcggatcgacgggcatcacgtcgtaatgaccgtagaccaataccgtcttggccttgggatcgaccgtcttctcggcgtaaaccaccggattgccctcggtgggaaatacctcggcatggtcggcgcccgccttcacgagcgccgcggccagccattcggcgcaccgcgtcatgtcgggccggtgctcgctctgcgcgctgatcgaagggatgcgcaggaggtcgaacaactcgctgataaagcgatctttatttgcgtctatatatttctttactttatccatttttccggggtgttattcggtcttcttcaatacgtagttttcgtccagcggacccgtcacgggctgcttgtcggcgtcgagccggcgcaggcggttctcctcgaccttgtagtactcgacgccctcgccgttttcgggagtcagggtcagcaggttgcccctcacggagtagccgcccttcgtatcgaattccgcgtcacggtcgatgtatttcatgtgcaggtcgaaagtgccgtcctttttcagtgtcagacgggtctcgatgcccggacaatccgctgccggaagcgttccggcataggtgccctgatagtcgagcgaggtctcggccgtatgcatgtcgggcgcttcggcgacggtttcggcaccgccggaagcagcttttttctgtgtatttccgccgcaggccgcaagcagggcggccgccgcgaggatcaaaattccacttttcataatctataaattaaatgttgcatatcgcttttatctcgccgatgaaacgctgcgccagcgcatcggcttccgctatggatttcgcctcggtgtagacgcggatgatcggctcggtattggacttgcgcaggtgtacccaattttccgcgaagtcgattttaacgccgtctatatcgttcacgttttcactggcataacgctcctttatctcacgcagtactttatccacgtcgatcgccggcgtcagctcgatcttgttcttcgaggcaaagtacgaggggtaggtggcgcgcagctgcgtcatggtcatccccttgtgggcgagccacgtcaaaaagagtgccgtcccgaccagcgcgtcgcggccgtagtgcaactccggatagatcacgccgccgttgccttcgccgccgatcacggcgcccgtctccttcatcttggccaccacgttcacctcgccgacggccgacgcggagtatttgccgccgtgccgttcggtaacgtcgcgcagcgcccgcgacgaggagaggttcgaaacggtgtcgccgcccggattcttcgacagaatatagtcggccacggcaaccagcgtatactcctcgacgaacatcgagccgtcctcgctgaccagcgccagccggtccacgtcgggatcgacgacgatgcccagatcggctttctcgcggcggatcgtctccgcgattccggtcaggttttcgggcagcggttcggggttgtgggcgaattcgcccgtcgggtcgcagttcagctccacgacttcgcaccccagccgccgcagaagctccggcatcacgatgccgcccacggaattcacggcgtccacgaccaccttgaagcggcgtttgcggaccgcctcggcgtccacgagcggaagcgccagcacctgctcgatatgcgtccggttgaacggttcgcgcgaaagcacatgcccgatgccgtccacgccggggtactcgaagccctcctcctcggccatcgccagcacgcgcttgccctcggcgtcggtgaggaattcgccgtcggagttgagcagcttcagggcgttccactgacgcgggttgtgcgacgcggtgatgatgatgccgccgtcggcccgcttggtgatgacggccatctcggtgcccggcgtggtgcaaagcccgacgttgatcacgtcggcgccgcaggccagcagggtgccctcgaccagatcggagaccatttcgcccgaaatacgggcgtcgcggcctacgactatggtaagttttttgccgggattccgctcggcgatcagacgtgcgtatgcggtggtgaatttcacgacgtcggggggcgtcaggttctcggcctgcgccccgcccaccgtgccgcggataccggaaatggatttgatgagtgtcatattttaaagaggtttatctatacatatatttatgaaaaattgtcttcgaagttttgatattcgaggtaaatatattacttttatgccaattatgaaaattaaaaaacgactattatgagaacgattcctgcttccgaattgattatcaacgacgacggttcgattttccacctgcacctgctgccggagcagctcgccgacacggtgattctcgtcggagaccccggccgcgtggccttggttgcggaatttttcgacaccagagagtgcgaagtctccaaccgcgaattcaagaccgtaacgggcacctacaagggaaaacgcatgacggtcctttcgacgggcatcggcatcggcaacatcgacatctcggtcacggagctggacgcgctggccaacgtcgatttcgccacccggcaggagaaggcgcagaaacggcagctgacgctggtgcgtctgggcacttcgggcgccatccagcccgacatcaaggtaggggagttcgtcttctcgcgcacgtcggtgggcttcgacggcctgctgaactactacaagggccgcaacgacgtctgcgacctcgccatcgaaaaggctttcatggagcacgtcggctggaacgaactgcttcccaagccctacttcatcgacgccgacaagacgctgttcgagcatttccgcgacgtgacgcgcgagggcatcaccatcgccgctccgggcttctatgcgccgcagggccgctgggtgcgcctcgaaccgcaggacgcgcggctcaacgagaagatcgaatcgttcgactaccacggacgccgcatcaccaacttcgaaatggagggttcggcgctggccggtctggcggccctgatgggccaccgcgccgccacgatctgcacgatcatcgcccagcgcatcgcccagaacgtcgatacggactacaaacccttcgtgcgcaagatgatctccacggcgctcgacaaactcgcagttttagaataacagaaaccataacagaaaataaagaaaggaaacaaacgtatgaaattttcagtatcaagctcggccctgctctcgcttctggctaccaccggcaaggttatcagcaataagaacacgcttcccattttggattacttcctgatggagctgagcggcaacgaactgaaggtcacgacttcggacctcgaaacgacgctcatcggctccattacggtagacagcgtggagagcgagggaaccatcgccgcacccgccaaactgatgctcgactccctgaaggagttctccgaactgccgctgaccatcgacgtaaacgataagaattgggaaatcacgatcaactggaagagcggttcgctatcgattcccggtgcgagcgccgtgagctatcccgccgtaccgcagctgagcgccgagaagaaggagctgagcatggacgtggatacgctggtcaacggcatcaacaagacgatcttcgccacggccgacgacgaactgcgtcccgtgatgaacggcatctacatcaatctggcgcccggcgcgctgacgttcgtgggcaccgacgcgcacaagctcgtgaagtacgagtccgagaccgcgaacgaggtcacggcttcgttcatcctgcccaagaaaccggccaacctgctcaaatcggtgctgctgaaggaggacgacgccatcgagatgagcttcgactcgaaaaacgcgctcttcaagctcaagagccacacgctcgtctgccgtctgatcgagggcaactacccgaactacaacgccgtgattccggccaacaaccccaacaaggtgctggtggaccgcgtcgagctggtgaacggcatcaagcgcgtggcggtctgctcgaatccgaccaccaacctgatccgcatggacatcggcgacaaccggatcaacctcacggcgcaggacatcgacttctcggtgtcggccaacgagaccatttcgtgcagctacgacggcgaggagatcacgatcggcttcaaatcgacgttcctcgtcgagatactctcgaacatggacacgccgaccgtggtgatcgaactggccgactcgacccgtgccggcgtcttcaaacccgtatatgacgacaagcagacaagctcgacgctcatgctgctcatgccgatgatgatcaacgcataacggcccctcagatgaagttaaacctcaagcgcccgatcatcttcttcgacctcgaaacgaccggcgtggacaccgccaaagaccgcatcgtcgagatttcgatggccaagatcatgcccgacggcgaagagatcgtcaaaacccgcaagctcaatccggaaatgcacattccggaggaggctaccgccatccacggcattacggacgaggacgtcaaggattgcccgaccttcgcgcaggtcgccaaatcgctcgaacagtttatccgcggctgcgacttcggagggttcaattcgaaccgcttcgacctgccggtgctggtcgaggagttcctgcgcgcgggagtggacgtggacttcaagcgccgcaaattcatcgacgtgcagaacatcttccacaagaaggagcagcgcacgctggtggcggcctacaagttctactgcgacaaggatctggacgacgcacactcggccgaggccgacacgctggcgacctacgaggtgctcaaggcccagctggatcgttatcccgatctggagaacgacatcgacaagctggccgaattctcgacccgcgccgaaacggccgactacgccggacgcatcctcttcaacgaaaaaggcgaggaggtcttcggattcggcaaatacaagggccgcagcgtggaggaggtcttccgcatggaaccgagttattacgcatggatgatgaacggcgatttcccgctctacaccaagaaggtcatcaccgaaatccgcatgcgcgaaaaactgaaatgacgatgaagcgactttgtgcgacagtcttgctgctcctgttgagcgtgtgcgccttcgcggtgcagaagtcgggaacgatcgtttacatcaacggctcgaaattctacatccatacggtgcagcccggcgaaacgctttacgggctgtctaaggcgtacgaggtgggcgagaaggtgattcttcagtacaatccgtcggcaggcggcgggctgaaggcgggggagaacgtcaagatacctttcgtgacggccgtgcccgaacccaagtcggagcggaagctgcgcaggaccttcgactcccacaccgtcgcgcagggcgaaaccctgtacgccatttcgcgcaagtacgaaatcccgatccagaccgtcatcgaggacaatccgagtctcgatccgaccaacctgcggctcggagagcgcatcctgatccgcaagaaggagatcggctccgaagacgaggccggcgccaaggagcagtgggaagcctaccgcaatacgctcaacagcgtcgccgaggagggctatgcctatcatatggtcaagccgggcgaaaccttctattcgctgtcacgccgcttcagcatcaccgaagagcagctcggctcgctcaacggagggctgaaacccgccgacctgaaagccggagcgatcatcaaggttccgggttcccccgaagagctggccgccggggagcggcagcctgccgacaccgtgcgcgcggactccgtccccgacctctccgccgacaacagggtgaaggagatcgaattccgcgcactgcgccgtagtgcgacgctcaatgtcgccctgctgctgccgatggacgccggcacccccaatcccagctatctggagttttatcagggattcctgctcggactggacagcgtgaagaccaaatacggctattcggtgaacgtctgtctgtataacacggcccgcgatgcggagaaaatccgcgaaatcaccgagagcgacgccttccgcaataccgacctgatcatcggtccggtctacgaggaggggctgtatccggtcatccggttcgccgaggagcacaacgtgcccgtcgtttcgccgctggccaacatcacgggcatgaacagcgacgtgctgttccagatggcgcccgacccggcgcacaaatgggagaaggccgccgaactggtgaacggggaccggcaggtaacgctgatctacaccgaaagtacggacaaggagttcgagcaggagatgctgacgctgctcggcgattcggactataagaagcacacctataaatatgtccatccgtcggcccgcacgaacagcaattcaggcgatctgacgccgctgctggacaacggcgccgacaacgtattcatcgtcatgtccgacaacgaggtggacgtggaccgcattctggcggccatcgcttcggccgacaccaacatatcgagccgcggccgcacggccccccggttcgtcgtgctgggcaatacgcgctggaaccgcatgaacaacatcgaccgcacgatgttcttcaaggaccgcgtgatcttcatctcgacctaccacgccaagcgcgactcgcagacgattctcgacttcgacagcgcctatatccgctccttcgggtcgctgcccacgctcttctcgtaccgcggctacgatgcggcggcggtcttctgccccgcgatgtacaacgacatcgaatacgacatggaaggccggagctacacgccccttcagacctcctacctattcgggcagagcgaggagcgccacaaccacgtcaaccgcagctggatgagagtcaactacaacagcgatttcacgataaccgtcgaatagtaagaccatggcatctttgacaaacgcaatacccgaaaaaaccatcgagcgcctgagcgaataccgccgcacgctgctggccagccacaagcaggggatcacgcatatcttctcgcacgtgctggcgggcatccacggcatcacggccgtgcaggtccggcgcgacctgatgctgatcggcttttcgagcgacacgaagaaagggtacgacgtgcaggtgctcatcgaatacatcagccgaatcctcgacagcccctcgcagatgaatatcgccgtgctgggcatgggacacctcggacaggccatcaccaaatatttcaacggcaagggactcaagctgaaaatcaccgccgcgttcgacgtcgatcccggcaaggtcggcaagaccatcgacggcattccgtgctaccacatggatacgttcgaagaggtcgtcgaggacaaggacatcagcatcgtgatcgtctcctcgccgacgcaggtggcgccgagtctggtcgttccgatcatcaacgccggaatccgtggcgtgctgaacttcacctccacgccgctgaactttccgcagggcatcgtggtcgagaattacgacatcaccacgctgctcgaaaaggtagcctatttcgttaaggagaacgaagagaaaaacagcagcaacacctaaaaaagagcggcaggagagagagcaatgagggtttttcacggtttcgaagcgcttccgcatttcacgcatccggcggtgaccgtcggatcgtacgacggcgtgcacagcggccatctgaaactgctgcgcaccgtgaccgccgcggcccgcgggcagggcggcgaaagcatcgtattcaccttcgagccgcatccccgcatcacgctcggcaaggccgacggcctgcgcctgctgacgacgctcgacgagaaaatctgcctcctcgaacggctggggatcgacaatctggtcatcatccccttcgacagagccttcagccggctggctccggacgaattcgtccgcgactgtctcgtaggccatacgggagccgaaacgctcgtcgtaggcttcaaccaccgcttcggacacaacaagcagggcagttacgattatctggacagccacggattcggcctgcgcgtaatagaggtttccgaatgcgacgtggacgccgaaaaagtaagttcgacggtgatccggcggttggtcgaaaagggcgaaatggcgcgcgccgcgcatctgctgtcgcacccctatctggtaatcggccgggcgcagcggaaccgcatccgggtggacgatccgctgaaactcctgccccctccgggcgaatacgacgcacacatcaacggcaagccggcccggctcacggtcgatgccgctcaggaactgataacccgcgacatactgcccgaagggcgtgtcgtcataacattttaaaccatgctgagttacgactgtcaaataagggtttggtacaagcataccgaccagatggcgatctgccaccactcgaactatatctgctattacgaagccgcgcgcagcgaattgctccgctggctgggcatgtctttcgccgaggtcgagaagcggggcatcatgatgccgattctggaggtgcagtccaaataccaccgtccggcctattacgacgaactgctcaccgtacgcatcatgctgaaagagcttcccacggcccgcatcaacttcttctacgaaatctacaacgaaaagggcgacctgctcaatacgggcatgacgcagctgggcttcatccacagcgacacgcgccgcccgtgccgcgttcccgactggttcctgcagctggtcaccaacaagtggacggaggagtagaagcggcagcgacacctccgatgattcccgctacggcaaggctccggagcgacgcaatggcggagactccaacggaacgatactgaaaaacaccgcatacgaaagaaccgcacccatcgggatgcggttcttttttccggaacgcgacttcggctatttttcgatcagcgaaatcgaacgctggatgaagtcggtcaggttcttgcccttgagcatgccgttggtcagcagcgcaaggtcgatgatctgcttgacgagccggttttcgccgccgatctcgcgcagccgctggtcgcgttcgtcgcgcagcgtgacgatcttcttcgacagctcctcgcgcgtcgatttctcttcgggagtcagctcatcttccttcttgcccttcaccacctcgtcgaagcggttctcctcggcgaccgccgcgtcgatcttcttggtgatcgacttcagcttgtcgccataggccttctccgcgtcggagagaatgtcggcgacgatggggtggttgccgtttaccgcaatggtgaagttgtcgggcatctgtccgtagaactggctcatgccgcctccgccgcccatcgcggccatctctttcatacggcgcatgaattcgttctgcgtgatgaccacgggcgcttcgtcgggcgacatggcctcgaacgaaatgttgtaatggatcttgtcgtccttgggcatctggctctcgaataccgggcgcagcagctcctgctgggcttcggtgagcgacatcttgatattctcctccttctggatcagcttgtcgatcacgtcgctgtccacacgcacgaaacgcgtctccttgttcttcgactcgtaccagttgatatagtggttgtccagctgaccgtccatcagcagcacgtcgtaccccttggccttggccgcttcgaggaacgtgtgcttctccacgggatcgtccacatagaggaagacgaccgtcttgttcttgtcggtctggttctccttcaccttctccagatactccgcaggcgtgaaatacttgccctcgatgttcttccagagcatgaactcctgcgccttctcggagaacttctcgtcggtgaggatgccgtattcgatgaatattttcagatcgtcccacttcgcctcgtagtccgcgcgcatggtgttgaacagctcctgcagacggtcggcgaccttgcgggtgatgtagctcgaaatcttcttcacgttggagtcgctctgcaggtagctccgcgacacgttgagcggaatgtcgggcgagtcgatcacgccgtgcagcagcgtcaggtattccggcacgatgccctcgacctgatccgtcacatacacctgattcgaatagagctgaatcttgttcttctgtatctcgaagttgttgtggatcttcgggaaatagaggatgcccgtcaggtggaacggatagtcgatattcaggtggatcgagaacagcggctcgtcgctcagcgggtatagctcatgatagaactccttgtactgctcctcggtaatgtcggcgggtttgcgcgtccaaagcggatcgacgttgttgatgatgttgtccttgtcggtatcgacgtacttgccgtccttccactccttgaccttgccgaaggcgatgggcacgggcaggaaccggcagtatttgcgcagcagctcctcgaccttcgaactttcggcgtactccagcgaatcctccgaaagatgcaggacgatcgtcgtgccgcggtcatgctccgcatcggtctcctccatttcgaattcgggcgtgccggtgcagctccaatgcacggtcttggcctctttcttataggatttggtgaagatctcgaccttgtcggccaccatgaacgacgagtagaagcccagtccgaaatgaccgatgatcgactggttcttgtacttctccataaactcctcggcgcctgagaaggcgatctggttgatatacttgtccacctcttcggcggtcatgcccacaccgcggtcggtcacggtcagcgttttggcctccttgtccacggcgacgtgaatcgtcaggtcgcccagctcgcccttcatttcgccgatcgacgaaagcgtcttcagtttctgggtagcatcgaccgcattggaaatcagctcgcgcaggaaaatttcatggtccgaatagaggaactttttaatcacggggaagatattctccgtcgtaaccccgattttgccgtttttcatagttttatatttagctgtattttgattcatttcatccgaccatccatcaacaaaccgtgtgccaccgcccgttttctgccaaactgtcagtcgggcatgacaaaggccgccgtaaaaagttgccgcggcgggatttttgccgtatatttgtccgacttcaaacagttaccactatggattttctctctctggcaaaaaagcggtacgcatgccgcaaatatgccccggcaaaagtcgagcaggaaaagctcgacatcattctggaggcgggccgcgtggctcctacgggcgccaaccgccagccccagcggctcatcgtcgtacgctcgcaggaggggatggagcgtctggcacgctgcacccgcgacttcggcgctccctgcgccgacaccggcgaagcatggacccgcaaatacgacggtaaaacgatcagcgacatcgacgcttcgatcgtcaccgaccacatgatgctggccgcagcgtcgctggggctcgacacgctctggatctgcatgttcaaacccgaagccgtccgcgaagagttccggctcccggaacatgtggaacccgtcaatatcctgctcatcggctacggcatcggcactcccgccgatcccgaccgtcacgacctgctgcgcaaaccgctcgcggaaacagtcgtatacgaaaccttctgaccggaacggaagcccaaaattccccgacggcaaaggcggcggtttttgcgaacctccgcatccgcgcacaccggaagattccggctacaaccgacagcaaaaaataagcgaaggcctcacgggccttcgcttatttcgtatctgcgccggtcaagcgcgttatttgctgcgcacacagcgcaccatcatcgccgtagcaggtacgaccccgcctgcggaaaccgacggattgttcgttgtgctggccgtagaccatgccagatagcaatactgtcccggcttggtcgcgctctcatcggccgtccatactgagatgatattcggcagcatggtcttcgtaccgtccttgtacaactgtccggaaggcaccatgtagatattctgcatgccgtcgctgcacattctgaacgcataaggctcgaattctttcgccccgtcggcgacaagttccagaagctgctccgaagtgggcatacgccacgttccggcaggcgccacgagcgaacacgggtctacatcgccgtaggggacgtccgcatagttcggaatcgactgttcaccgggtccgtaaaccacaccctgatatttcgtcgaactcgaaaccgtgccttcgaacttgatgccgtacttgctcttccacttgaagtacataccgcgctccttgggttccgcaaaggtataggctccgtcaacgacagtcaggtagccttcgctccaagtcaccgagaaggcgttcgtcgcggggttggcctcctgccggacgctctttccggtatcggagccgttgacccagatggcgagcgtgcgctcctcgcccgaattttcgggaaccgagaacgaaacggtcggattctccttcgatccgttctgcgtcagctccagcccgtcgctgcctttgatgaccacggggaacgacgcaaggtcgctctcgcactttacgctcagcgtaaacgcttcgtaggtggctttcgacggagagtgggatatgtaatccacatagtttttctttcccggctgcacgaacgagacgcccgaataaacccggttgatgaacagccgccattcgcggtttccgacttcgtcgttcttgggcacagtcagcgtaacctccgtctcggacggcgatgcgtcgatggaccgaatctccccgtcctcggcttcgatatcgacctcgtaagccgggaattcacccggatcggtcttgacggtaagcttgaacgaagcattgtccgtcaccgaagccggcgtatgcgacacataagaaggctggcggatattcttcacgcagcggagcgaagccatgttcgtgcccgcaagatcgtaatccaccatcgaatagtcggcgttgagtacataaatcacaccttcacccgcataattggcgcccagtccccaatatccgccgaactgagactttccgctgatctgccccgaagcaagttccagcgcgccgcagaaaggcatgaaatagtccgagctgagataccccatgccggtaatgccgtccaatacatgctggttcatgtagtcttcccggtcgtaaagacagaaaagctccatataagtcggcgtacgcagcccggcatcgatcatcgtgcacggatcggtattcggctggcggtaggggatgtcggccagcgccacctgcacggcttcgggcgtataggccgttccggcgtacgaaccgccgtccgacggcacgccgtatttgctgccctgacggaaatagagtccgaggtcggacatcttgtcggcaacggcgaatttaccgtccataagcgtaacgttgcccttcgcccaatagaaaccggccgtcagtacgagcgcggcctcctgccgggcttcgacgatcttcgtccattggggttccgcacccgcatcggccatctccacaacgatattgcgttcgttctcggtatagttgcccgcgatttcgacgtcgatgctctcggtccgctccgtcaccgccaccggatcgccgaccttgtcgccgagcgtcacgcggtactgccattcgacgaaaatcggatcggccgcacgggtctcgatgctcgtggtgaaaccgagtttgtaaccgccgccgttgtaaggaaccgtttccggaatggtcgtggagtcgtattcggttacacaatagtcttttaaggcaggctcctgttcagcctcgacgatccgaatccaccgggggggggtagcggcatcctctgttacagccatttccacgacgaccgcccgcggttccttgctgtagttggaaccgatgacgaccgatacttccgttttgggttcggtcacggctatcgcatcgccgacagcctcaccgagcgtcacacggtactgccacggttcgaatacgggaacgaccggctgggagcgagtttcggtgcgggtcgtaaaagtcatcgtgtaggcaccgccttcggcaggtatcgtctcaggaatggtcgtcgatgcgaattcggtcaccgtatactccgtttttttcgtcggttccgtattgtcgtccgaacaggccgacaatacgacacacaacatgcctaacggaaggcacaagcatttgagtaaatttttcttcatagtacaaattaaaaaatgagtggacggctaaagtagtgattttattcctcgcaaacaaacccggacgaacaaaaaagtataatccgcacaaaatgagagatcggctaaatccttgtaaatattgatatttattacgatttatcgctgccaagccgaatcatgcttacatgttttccgcacatcagatcaaaataatacaaatccgcagcaaaacacgccccgttgcaagccgaaaaccataatacaaaaaataccgctcatcttgaacgtccatgacacttttttgtaactttacaaggcaggaaggtccaccggaaactgcgccggatgcgcgacgagcgaaagacaacggaaaaagcaaatacggaactacaaatcaaagcaatatgaagactaaaaaatcaggaatactaattttattcctttgcatattctgcgtcgtcggctgcgacaatgacgaaaaaaaaggacgagaagtaaccgattacaaagaatatattcttaccgttgcatccagaaaagttccgggagtattgacttccgacggacacaattatctgacagacgtatatgccgtaaaaaaagagctgtccgatgaatggattcccttcggcaatatcgaaggatttgactttgaagaaaaatacgagtgcaaaataaaaatcagcgaaacgagctacttggattacggcatgggagaacccgcatggacggaatatgaacggcttgaagtaatatccaaagagaaaaaggattcggaggagatgccgttgcactttattcccaaatggtattatgaaaaccgtccccttcctcaatacagatatgcaatagaatctgaaaacaaagagcttatcgaagaagttttgaaagccaatcccatccttcccttggattatcattatttgctttatcgggatgaggataatcacccgaaagggattgcgataaaagacgacgacgatttattcggtcccagcattataaaaagcacaaatagaaatccggaagaaatgccggagtcctacaagctgcttcctcccgaagaacaggtgcaaggtttcatggaatggacattttcagatgaatcgggaaatgcaaccgattacccgtcattcgatgtgtttgtcgcccattcttctcgatcgaggagcgttggtcccgcacccgaccttgtctgtctctataaagaccttacagaacattacaaaaaccaataccccgatgccggagtaaaaacggttgtcgtttctttcacaatagacatataacaaaataaaggcaacgccctaaaacatgtcaatccgctgaaactctggaaccgaaaccggcacgcggcacggacatccctcaaaatcacctatagcgcaaaaagacagcgggccgaaattcggttcggtatttgtaggtaagagaaaatgcagaaaagagtaaatatcttgtttacaggtatttaattctctgttctgcatctgttccgagcaataaaattgcagaatcgggcaggtttgacggtgagttttgttacttatccgttacctgcccgaaatgcttttgtttgcattaaggcgtttgttttcagtttgttgcatcggatttccgcataacaaataacttgacttaacgtttaacccatccacaaagttcaagttattatgcaacgcagcactttcaaagtccttttctatgtaaaaaggcagtcggaaaaacacggtcaggttcccgttatgggccgtatcaccatcaatggcacgatgtcgcagttcagcagcaaactctccgttcgttccagcctttgggatgccaaagccaacaaagcctccggcagaagtcttgaagcccagcgtctcaatgaaaagttggagaacatcaagaccaatatcggcaagcagtaccaacgtctctgcgaccgtgattcatacgttacggccgaaaaggtccgcaacgctttcctcggtatgggtgacgactgccgcctgctgttgcagaccttcgacgaatatcttgcagatttccgcaagcgcgtgggcaaagaccgcgcttattccagttatgaggactactgcaaacgccgccggcgtctggcctccttcctcgaatacgagtaccgcgtcaaggacattgcgttcaaagagctgaagcgggatttcatcgaaaagtttgtggtctacctctcctcggtacaagggatgcgctccgggacgatccattctacgctcaagaaattgaagctgatgacctacacggcgtataagaacggctggattgccgccgatcctttcgcagggttctatgtcaaagcggaatacgctgaacgacgttatctatccgcttcggaattgcaggccgtgatggatgtcaggctccccaattaccgaacgggtatcaaccgggatgccttcgtcttctgcgcctttacgggtttgagccatgcggacgtagtgaaactcacccacgcggacatccatacggacgataacggagagcggtggattatcgacaaacggcaaaagacaggtacgcagttccgtgttaagctccttcccgccgctgaaatgctctacaagcgttataaggatacatatcgcacaagcgagaaggtttttccgcttaaaggcacttataaaacactgaacatgtcgttacgtcatgttgccagacatgccggtctgtcgttcaacccgacgattcatatggcgcgtcatacctttgccacgacggtcacgcttacgcaaggcgtgcctctggaaacggtcagcaagatgctggggcacaaacggatcaccacgacccaaatctatgctaagatcaccaatgataaaatcggacaggatatggcggcattaagcgagaaactcagcagcgtcttcaaggtcgcacggtaatggcctcctatcttacagctaattcgattcccgatcttacttcgtcaatagcagggtaattttcgatgtaagttttcccgccggcagggaatttatcgtcagagatggaaatatgcaaggccatgcgaatcgcccgaggggcgagccttgcggatttccatccccggcgttttgctggtcgcatgtagatttgcagcgtgatgtaatcacaggtaatttcgatatggagtcgcagtgaaccggggcttgtcgtaagctttgaggcttggcggtagatttggactgcgactccattaaccagagagaatggctgtttagaattgtaggtttgaagacctggtacatgtgatagcatacgactctcacaaaactaacaagttatgcactatttgtattatgtgggtctggatgtgtcgaaagagactttcgatgcgtctttggtcgccttcgaggatgcaaacgagatggctcaccgcaaattcgccaactcccgaaaagggatctgctcgtgtctgcactgggttgagaagcggcatggtattcggctcgacgatgtgattttctgcgccgaggatatggggagctacatatccgagatggcggtttgtgcttccgacaggacgctgaatttcaatttttcactgatctcgccgttggtaatcaagtattcgatgggtattgcccgtggcaaaacagacagagtggatgcccggcgtatcgccgagtatgcgatcactcactatcggaagatagccctttatctgccggcagagaaggaactgtgtcagttgcgcacatggctgatcttaagggctcatctggcaaaacaacgtgtagcgaaactggtgttgctcgaaaaattagactacaaagagaaattcgcggatgtatctattcaacgttccatgctccaggaggagatcgcgtatgcagaaactcatatgaaaaccatcgaacgggaaatgaaggaactgatagccgccgacagcaacatttgccggaactacaagctgctgaccagcatcaaaggtgtagggccgatcacggccattgtgatgctctgttcgacgcttaatttcaccaaaatcacagaccaccgcaagtttgcctgctattgcgggctggctccgttcgaacatagctccggcacaagcgttcgcgggggatgccacacatcgagcatggcgaatcgagacattaaagtacaactgaaccgcagtgcactgattgccatcaggtgtgatccgcaactaaaggcatattacgaacgcaaagtggctgaaggtaaacataaattcagcgtcctgaatgctgtgagggccaaaatcgccgccagatgctttgccgtcgtaaggcgtggaacaccatatgtagcgttgcagatataatccggcatacatatctgccattcgataagattttgagatcattcaaaatctcaaaatcttattgtcggaacagtccgtctaattgggagccgaacctactcataattaatgtattgtcatttccgtactccgcaaattaacgattctgactatgggatgcaaggctatacaagcgcttcgcggccttgcatcccataaccagaatcattttgctaaacgctacgacaaaaaatgacaatttccgggcatgaaactttttgcagcttttatttggttttatcttagaattctaccgtcggaataggcggctttctgcggcccggacgctaccctgcggactgcccctccaatagccataatccacgacacgcacgtcatataccccaataggcataacaaccgctcccgacgtttcgttcagctgtccgttataattcgcattgtctgttcaaaacggtcgtctgttgttcttcttctcgtggagataattcagctcaccgctgtaaatgtccatgacaaatcgcagcatattgtcgaccaaggccgtaagccttgtactctcattccctaacaggtggagtatttccgatactttgtgcttggttcgggtactgacatagatcgcagagcggttgcggcaatccaccggagcgaagaacgtgcgttcaaaatccggtagcgtgagctttttccgacggaaaccggaatgttcttttacggtactcgcagtggagtctatgcctgttttctcagcagtcggtgccgatgctccggataccgtttccgatgtgttttcctcaagagcgttcgtatcttcctcttccggctcgggaatcctgcggacgacttccgagtccaaaggggcttgtccggcgatcatctgacgcatcagttcctcgtcgacttcgatacggggacgcttagcaggattgggtgcggggttgtctttttcctttaatgaatccatggtgcaacgtttttgagattgattgtcagccatacgagcatagagtatgtatgtctggtttattgggttaaaccattcaaaataccgttttctatttcatgcagtttatatcgggataatgaacgcaataagaaaatcgacctttcatgctgcaagatacaactgggtgaaatacctcggttccgatgtccgctccagaccgctccagtccgtaccgagggtttgttttggcgctgtcccgtcctgaaaaaggtttacagaaaagagtaaatcttatgcagcaaacaacgaattcagacttatcacgtcattatttaccgcgtcagttgcgtcatctgattttacaggagtatttgagcggagtcaagacggctcgccaactctccgaagaacatggtattcccatgtctacgattcataagatgggtcagcggtggaaagcgaaaaatagttgtagctttgtgagtacccctaatccttatccgatcatgtcccgcgttacgagtgaagaagccagtgaattattatccgagaacaaagcccttcggcggcgcttggaagaggctttattacgtctggaaggctatgagatcatgggagatatcctccaagaagaatacggtatcgacctgctaaaaaaatccgcagccggacagtccagcgtctcaaagaaagacacacagcaatgagcctgtcgtttctgtgcgggttgttcggctatacccgtcaggcctattataaacatttacggcgtaatagggaaggatctttgtccgacacccttcttttggagcgggtgggttactaccggaaactgatgcccaggctcggcggtcgtaaactgtggcatttgctgcaacaagacggatttccggtcagtcgggatcggttatttacgctgctttcggaaaacaatcttctggtcaaacgtcggaagaaatacagcgttacgacctgctcgcggcactggatgcgtaaatatccgaatctgatccggggtttcgacctcgagcggccgcatcgtttatgggtcggagatattacgtacatttctttgaaagaaggatttgcatatctggctttgataacggatgcctattccaaacggatcgtaggctataatctgaatacgacattggaacgggacggagcgctccgtgcactgaggatggccatagaccagactccgcagcaaaaacggcaagggttaatccatcattcggacagaggatgccaatattgttcgaaagaatatgtgaaattactgaccgataatgggattcgcatcagcatgactgaaaagggcgatccgtatgagaatgccgttgccgaacgggtgaacggtattctgaagagcgaatggatcgacgaggaatgttttgaaagttttcaggcagcaaaagaacgcatcgaccagatcgttatcctttacaattcactcagacctcatgccagctgcgattggcttacgcccttggaagcggaacttagaaccgggaaactcaaacatcattggggccgaaagacggttgttcggaaggcatatgtaaacttatatcaggacaatattttttgaaccaaaatgtttatctttaattatcaatcactgtaaacctttttcaggacgggacacgcccgcatggttgtaatattgcagagggaaacgacccaccctcggaagccgtagcggaggtttggcatagatttttcgaaaatttttccgccgcggatttttcgcctcacttgaggcgagcgagctgtacctttgtatgccgaaaattttttcggcatacgaaaggagctcgctctgcgaggccgggcgttctcccgagtcgaacgcctttttaaccgatatcatgaataccgacccaaaacagacaaacagaaatgcccggaaatctgaaacaccaagctacaagtactctttctggttcaatgaagagcacatccgcttcaagaagctactctgcaagtccggattggagcataacaggagccagtttatcgtaaaacgcattttcggagaagagttcgtcgtcatcaaacgcgacccgtcaaagacgcagtttatcgcccggctgaacgacttttattttcagtttcagaaactcggcaataactataatcagattgtaaaggctgtcaattcgcacttttccaacgtcgctatcccgcatcagatcgctatgttggagcagcgaacaagagaattaaaggctctgagtatcgagattctgagctttgcgaaacatactgtggagtggttgcaaatacgacctgctgggacagatcaccgaggacggtcccatgtcacaggaggagttcgaagccatgcgccgaaatctttcacgcaagcgaaagccacggcgaaaacggactatatcacgctaaatgaacaggccggaacatttattccggcctgttgctaatgtgaagtgtgcgtcatcaacggaggagctacaaaagagcaatgtcctccgggagaatattaaaaacccacgagaagtttaattgatcgctatgactatattttttcgtatatagccgccaataagattcattgaagaattgtctgccctctgcgttccggtctatatatttccatattttcagtaattgaccatctttggaacagatgcttatacaccattcttgttccggcttaccgttccacgcatcgtaaaatgtgtcaaaagtgggttctcctaaatattgaaacggactgaagctatgaactaataccgaatctccgggatcgacaacagcatcagtatcaatgaacggtgacgtagtaataattaaaatctgatcggtattgttttttgcataccatgaagttgcatgcgtagccacccatttcttcgggtcgcatgatatgctaattagtgtaatcgcaaatatgaaagcaatctttttcatggcatttgtaagttacttaatgtctgtggggtaaatatcgaaaacccatgtaaagtttaattcgtcgctatggctatattttttcatatataaccgccagtaagattcattgaagaattgccgctcctctgcgtctcggtctgcataattccaactctttaataagctcccttcattcgaaagaatatcagtatgctgatcttggaccgctgtttttttccaaatgtcatataagccgttgaaagacggaataccccaatgttgcggaggacaaaatgaatgaaaacagacggaatcacccgaaataattgttaatatcgacattaaatgtccgggaacagttgttatacttattggctcattagttgcgtttttcacataccagtaggtataatgagtctttaaatgctcaggtggatcacatgagacaccacccagaatgattatacataggacgaatatttttttcaaaatagattgattttaatttattacaaactcatggcatttgtgaactactcaatatctgcggggagaatgtcaaaaacccatgcaacctcacaagtagatacatgttggagttgtggtttttgataaaatctccatgaagtttcttggaatattcttactgacggatcatttttatccgaaattttccaagttttaagtaattgcccattttctgacaggacatccagattttgttccaccccattcccgttcacgttccataattcataaaatagatcaaaagagggaaatcccaatttttgcataggtaatctatgaaaaacagatatagaatctcccggattcaatagccgttccgtcctgaaatcacgcttcttaattacaattggtttccaagtcatattttttacgtaccaatgtgcactattggtcggctcggtagtatgaaatattctgcatgatacgaacaaagtaaggctgataacagcaaaaattatttttttcatagaccatagttttcgtgtaaagatacaaaggttcagggaacaatgtccctgaacctgttaaatatattaattaccgcaagttatttcaagctgcgcgccttgattaattgtaaacggagagtttatagtaacagacttgttggcccgaaaggtcagtttcgcactattcgttacagtaacattccgcgtaagaatattattccctgaaaaaacgaaagacgaagaaaccgttttgttggtataaaaggcatcatgcgtcaaatctccggtatcaggtttggggacattcggggtaatcccgttgtccgtaaatgccttttcgatctcatcagccttttcgggatatttttcgtacatttttgcgactaatctgtcataggtatcgaccccaacgaccaaacaatcatatatctgcttcttagttaatactttatccctttgcaggtcccaaaacacatgaggtttaagccaagtatgcacatccggataatcatccaaaagacctgacggattgtatttttcataggcccggatatgtcccattgagtaaccccacatttcaccaattccacaaagttctgcattcttacccgtcccgtttccataagaaccgtatgtcataatatagctgatatacttcgcccaatgcgcacttcctacttgactgaaatgactggcgtgggacaactcgtgatttacaacgtcataaaccttccggtaagagtgtccacctgttcctatcgtaatatcaggtagaaccttttttagcatttgattcagcaccgttgcaagagtaccgtaaccgatattgataaaaaagtttttccacgatgaattaccgttatacccaataggatgtacaattcggcgcaacataggtgtcgaggatgtcgtccagcgtttgaaaacccaaattttaagattacggggcggtttggcaattcctgtttcttcgcacattttatagtaatcgtaggttgcattattaacagccgcccaatcccaagcaaaacttccagcatttatatcgcgtgagtgtcctcggttactatgccaacccatattaagattggcccgtgcaatcggcccccaattaccccagatgtcaaaacctttcctgttgtcaaaaacaatcgcgtaatgcggtccgaatctgaatttgctgtccattgtataatggccgctttcgtccgtaaatgtcgtagaccatttaataaatctatggcatctgattttaactccttttaccggaacaaaagcacctgcataatcatcgtaaactctgatagttccctccggtctgcgttttccgcgagtttccggttcctgttcttcaagggggtatccaagacttaaaaaagcagcttcctccacatttataatacccccgcgagtgggtgagattgtttcatcttctgccggaatatagcattcttcaatcacctcataaggtatttctttgggaaatgcgaagtctggctttacggttgtatacaaccaagtaaaactaccctccggaatagtcgggtcttgataaaccgcatcttccggaagttcgatattgagcggatagtcgaacagttcgaggtcataatcgtttttcagggcaataagttgtaaactgtcctgcggtaagaatctgacgtacaaatccgtcggttcaatagttttagaaacattatacgaatcgtaaactccctgtatgacatcaaccgtgtacggattcggtaaaagttcatattctaccatatcacttccatccgaacgggtttttgcgagtgccggcgcgttggaattatcatcggtcataatgtctgtttcgtctttggtacaagaggacagcatcactgccaataataatatcaccgaatatattttcttcataaaacagttttatgtaattccgtcaaaattcaatgatttcctatttcccggcagcttttaattgactttccaatgcagcgacgcgcgcggttaactcctgaatggcgcccgtcagaatcgggataagggcggaataattgacaagacggtcaccctcttctgtcatggcgactgctccgggaatgatagcttctaattcctgcgccaaaaaaccgtattcctccacaccgctttgcacgggacgaatattgaatctttcgtattcgctttcatccctccaatgatatttcacgggattcaatttcagcaccatattcgttgacgggttagattgtgcaggcgctatgttaatggaaaaagcagaccgggaaacgggtgtcgttttcaatgagcgaatattggttttcagtttttcatccgaagtctgatacatcgtgcggcaataaaggtcgatatacaaggacctgtcgctatccaaaaacacaagtttattggttgtagtagacatacggggatcggctgcatgaatgtgcattttgataccgttctggtccgtggccccccaatagtgcgcccatcccgcccaactcgtcgtataggttttatacatacctcgtcctacggtgagtttgccgtccttgtaggtcatttgggccaagcagttaatcgtaactgaaagaacaaacagaatggtgaagatcgtttttttcataagacaaaattttaagggttaaaagttattttgaggtttggaaattggcgttttgaatattgtggacacgatcattttccgaacgtgcgggtatatgaaaccgacggcatgataggtatcagcaccgttgccttatagctgccccggtaagggtaaatgctcacggggtttttgtgccatgtggcgttgatgatcgagaactgccagttgcgcacgccgttgcgcttgcggcgctccatgttgtagctgacatcggcgcggaaatagttgcgcatccgcatcgtgggataggccgtgatgccgatgatcggattaccgtccgtatccggatagctttcgttcgtcaggcgatacggaagcccggagcgccatgcaacattgagtgaaaaggtatgttttcggcccggtcgcttcaccacgtcgtagctgacgaacgcattgaaatcgtgcggcacgtcatattcaaacggataggttacgccgtccgagcggcggcgggaatcggtataggtataggaagccgtcaggctcaggcgttcggtctggtactggagcattgcttcaatgccgaacgctcgtcccgtgccgtaaatgaagccgccgttgcccagcaggaaatcgtcgctgtcgtagatcagcggcaggttgcgcattcgtttataatagccctctaccgaaaggggcaggttttggtgcagcttcgcacggccaccgagcgatacctgccatgcgtgttgtaacctgccgtcccgaaacggggtccagaagtcaatcggcatcgagtagtaatagcggttgaattgaacaagcgcctgagaatttatcgtccccgaaagccagaccgcattgtcgcggccaaaatcataggatagttgcgcacgcggctctacggcatatcttgtctgctccgaattgtcatagaccgcgccccgcacacccacgtcggcccgccagcctccccattgaaagcggttgttcaggaacagcgcccccgaaacaagctgctcggaagaatagccgcggttcttgtgctgtccgttgatgatgcttttcgtgtgcatcggttcgaaccgctggtgcgaaaacgcagctccgtactccagcatccagatatgcgaaagccgttggtcgaacgtcatgcgtgctccgaactcgtgggttttgaaagtcgttttgccccaattactgaaaccgtcgtctttaaattttgtttcctgacggttttgcaggtaggtatagtaggccaccaccgaggagcgcagattatcattccaacgcgattccagccgcagggatgccgtagtattgccccagccgaacccgttttctgcgtgatcttccttgttcttcatgtggtcgtcgccggaatagattccgagcgaaagcgtatgatttcggtgaatgtcgtaagtcagtttccccgtcacgtcgtagaagccgtagcggacagcgttatcgacgattgcaagcaccgcttcgggaaagaagtaacgtgctgaaatgaggtaggaacccttatcgcgtttgataggcccgtcgagggtcccggccaacgacaaggttcccaccgtgagcgactggcggtgattttgtcggtcgccctcgcgtgtgcgaatctgcgtcagggccgagagccgggagccgtaggcgggcgatatgtagcctttcgacacctcggccgattggaccgtttcgccgctgaaaatcgagaggatgccgtaggcatgcgcctgattgtagatcggcacgtcgtcgtaaagaattaatgtctggtcgttgctgccgccggtgtacaaggctttcaaggtgggggcaaaccttaattaccggaatctaaaccgggatctggtaaaggcaaacaccgtgacggtcggcccggagttggcctattacgccctgaaaggacggaaattctcgctcctggggatcgcagccgggacgatcggctaccaaaaagccaaggcgaaaagcgatcttgtgtacctggcgaaaagcaaggctttcgtgtatggatacgaggtcgggataaggccggaaatgttgctaagcccgaaagtggctctttttgccgaatacaggtttgaaatgttgtttaactccattctccggaataacaaccatgtcggcctggggtgcgtgatctatttataaacttaaataattgaaggtatgagaaagtatttgtatttgtcggccgtatgcgtgtgcatggcattgtgtttcgtcggttgcagcaaggacgacgacgaaccgggaggaaaaggggcgatgtatgaggtaacgatcgagcagtcgggagatttccgcagcttcattaagtcggtcgtggtagtcgccaacggtacgcggttgaaagacggggcgacgggggaaagcctcgcaagcccgttgattctaagcgatgaagaactggccgtcgaaaaggtgacgttaaccacgacgggaaaggcgatcgagttcgccgtttccggtagtgtcgtggacggggaggacggtgtcgtgaacgagccgatgcagtgggttgtgaccgtttacaagaacggaaaggagatcgagaaaaagagcctttctttccgggacgggaaggagatcggtatggatgatcttaatctgtattataattgacgtgacgacctgaatgtcccccggatgaatgttcgggggattttttttcttttgggcgttcccgtgggacggtcgggctttacgtttcaagtcctcgcctaaaggctgtgggctttactctgcaatccctaacgcatggctgaaaactcctcttgccggtggtgttcttcttcatacagcctcatgcgttcttgtaatgcttcttttaaattgtcgctttttttcagtccgagtttggcacgtatgttcgctcgttggctggttatgtttccgctactccgatgtaataattcgcatatttggctgacggtcttgtcttgcagtattaaacggcagatgtttaattcggacggggataaattgggatatattctcctgattgtatcaagtttacttttttcctttttctggtatgcggcaagggctgtaaaaagattttctttggattgttcccctattatgtttaacagggagcttgtcttttcttccgggttattctcgcttaacaactcggcgaacgcgaatagttcttcctttttcatttggagacgtttcaaaagcatttcctcttcctcttttagcaagttgctactttttagcaagctgctgatattactgtgtaaggatcttcctaataaggggatcatggtgtatatgatgatgatcaaaggcagataactgtataggaacggttcgtcggtgataagtgtgcagattgtataggaagctatggtaagggaggacaataggatggagatattactcatataggcacagatggaaagcatggtaaataagagagagatagtaatgttactcattatcaatgctctttgataactatattcatatccgctacatattgagcaataaattatctcgataaaaatctcgatatgtatggctatcagtataatggaaaaggtcgtggtcagatttactctctttttaaaataagcgagagtgcacataatgataaacaggaataatacgctgttaatataataaaactgttcattgggaaatggaactgaatatatgtatatgggtgcgcataaggccagcatgagcagggatagatgaaagacacgtttttgttgatacgttattatcatttcgctttcttttttgtcgtaagtttgagtttttattgaacttagaaaagtagcggcttttgtgctgaatttcatgtgttttattgttttaagtgttattaagtataatgtttcctgcaaaaataactgttttttttgtatgtttaagtacttttctttatgatgttaagtgtttttaattgttgtgtaagcgtgattggctgctgtggtaagtgttgtagctgttgtgtggttgtctttttaagtatttataagtttaaaatacttgttttttgctttggaggttggtttataggtgcatatctttagcggttgaaattcagggggtgtaaaagcctgggtttggattgtcatattaacaaatgattaaatgacgaaaagaggtttttatattaaatgtgtattgttcgtgctcgtgttgagtataagcggagaaatatccgctcaggagaagcgtgattcggtaaggatctattttcatcaaggaaaggtaaatatagatacatgtttacttgacaatgggaacgagatggagcggtttgctaaaatctgttccgcattgaacgactccgtccgtcttatcaggaaaattcaaataataggaggagcttccccggaaggaggggggctgttgaatggaaggctgtctgaaaaacgagcagaggttttgtggcggtatatatcaccttatataaagattccggtattggagagggattttcatttttcgggaagcgactggaacggacttataacgatggtgagagcggatgtgaatgttccggagagggaggatgtccttcgtttgttggagaagatcgtccgtttggaaaaccaggacagcccttatttggggggagaactgaaaagactgaaaggggggaggccatactcatatttgtataaattccattttccgaaacttcgttcgtcgatggtgaaaatatgctatgatagtgatccgataaatcccgtcagagatacggtatatatacatacacgtgatacgttgtgcatccgtgataccgttaccgtcatagctccggtaaagaaacggccgttttgcatggcggtgaaaacaaacttgctttatgacgctgttttgatacctgacatcggggttgagttctgtttggggaagaactggtctgtggccgggaattggatgtatgcctggtggaaaagtgatcggaagcataattattggcgtatctatgggggagatgtggagttgcgccgctggttcggtcggagagcggtggaaaaaccgttttccgggcatcatgtcggattgtacgggcagatcgtcacctatgatttcgaattgggtgggaaaggttacttgggggataaatggagttacgggggaggcgtggcttacggctactcgttacctgtgggacatcggttcaatgtggatttcacgttgggaatcggctaccttggaggattgtacaaggagtacatccctttggacggtcactatgtatggcagaccactaaaaaacgctgctggttcggcccgaccaaggcgggtatctctttggtgtggttgatcgggcgggggaattatagccggaagaaaggaggcaggcagtgatactgatacgctttagtctggtgttcatatttttatggatgggactgacggcttgtgagcataaggatttatgttacgatcatccgcactttgccacggtgcgggtagtattcgactggaccaagatttccaatcatgacaagcctgaaggcatgagggtcgtattttatccgaccgatgatgaaagcaacacgtggatatttgatttccccggaggagaggatggggaagtggagctccccgagaatgattaccgggtaatttgcttcaactacgataccgacgggatggtttggaaagaaaacggcagttacacgctttttactgccgatacgcgtgatgttcggtcgccggataaccagacaatggccgtcaccccaccctggctgtgtggcgaccatatagacagagttatcctcaaggacattccggaaggaagcacgaaggtaatacggctaactcccgtaaacatggtatgtcactacacgtatgaggtgaacggaattcggggactggacagggtggcggatttgcgggccgctctttccggcatgtccggctcgcttaacatgtccggcgacagtttgcccgccgatctttcggagagcctgctctttgatggaatggtttcacggaatcagattataggcggattctatacgtttggacattccgcacttgaaggagagcccaatgttttccggctgtatctcaagaaccgttcaggcagcatgtctgtattggaacaggacgtgagcgaccaagtgcatgatgtcccggtagcggggcatatcggtgatgtgcatctggtgttgaattttgattatgaggtaccatccgagccgggaagtggcggtccgggatttgatgtggacgttgatgattgggatgatgtgaatgtggatatagtgttgtaatcgagttttattaattatatttattaacaattttattcattttatgaaaaaaagtacagtaatgttttgggcaatctttggagtactactgatgagttgctcagaagaggagattgcgaatgtggaaacctcctcacgaaatgcgattggttttaacgtgttaagtaatgcggcggaaacgagggctacccctactaccaacaccaacttgaagaacaccgatttcgacgtgttcgcttttacggcggatggtactgccttcatgggaaagaacgacacggaatttgcacatgacggagtgaagatcgtgtacaaaaatggtaagtgggattatgacaatgcgagcgaccttcgttattggcctaccgaggctttggacttttacgcgttcaatcccggaacggttagtgaagacatgatggtgttttatagttgggaagccaccaaggatgtccaaaagataagttatacctgcatggatgagtatggagccggtactcatgaaaactacgacgtgatgtatgccatggccaaaggccagacaaaagacatgaacaacggaatagtgaaatttaatttcaaacatattctgtcacaggtcgtattcaaagcaaagacccaatacgataacatgcaggtggacatcgacgtgatcaagattcataatttcaaatttgccggcgccttcacattgcctgcggcagccgatggaacgggaagttggagttcgtctgatttagcatttccacacgcatttaccgtagtgaaaaacgcaaacatcacggtcaatagcaataccgaagctaccgatattaccacaaatactcctatgctgaatataccacagaagctgactgcttggactgtttccggagccagcaaaaccaagaagggtgccgacgatgcgaagcaatgttatctggagatctcctgcaaaatccggcagtccggagtttatctgttgggttcagcaagcgaatacaaaacaatttatgttccgttcggagatacatgggaacagggcaagcgtcatatctacacgttgattttcggtggtggttatgatgatcagggagaggctgtgttgaatccgatccagtttgatgcagagacaacaggctgggttgatgcagataaagacgtaaacgtccaaccttaatccaaacgtttattaatatcgtacccgttggcaggttaaacatacgcaagattaaccctgccaacgggttttttatagggaatcgcattttcaatatactttttgatgtgtaggggtgctttttgcgtacctttttcctggagaatttcttttgtggagtgtttgccctgtatattcccgatacgctgttatagcagggaactgtttttatccaagtagtcagatatagcctcttgcaataccgattttagcgaatcgcctttgcggatcgcgatcagctttaagttctggtgataggtttcgtccatgacaaaattacaatgcacggttttcgctttcttcggcttttgagcctctttttgcccggccgtggattgggtcaggctgtctaatcccccggtcagcccggccgacatactgttttttaaatcgttcttctttgccatatggttactttatttctgttagcagttcgttacataccttctcgtagtcctctgccccggcagattttggggcatagtgaaaaatatcctgcccttgtgtcggggcttcggccagcgtaatggcgttgcgtatatgggtgctgaacactttgccctggaatgtttcctgtaccagttccgaaacgctcttgttcaggttctttcttccgtcgtactgggttatcaggaccccggcgatcgaaagatccgagttcaaacgttgctgcaccttgtggacgacctgcataagtttggccattccacgcattgccaggaattgagcctgaaccgggataatcaaccgatccgaggccgtcagtgcgttaagcgtgagcagcgacagcgagggggggggcagtcgatcaggatataatcgaatttttccttttggcccttgataaggtgggctaagataagttcccgcccggcctcgttgattaactccgtttcaacggccgagagatccaggcaggagggaacgacgctaagaccgtccttatgctcgtagatcggcaggtcgtattcgcctttcatcgcgccgtagatcgtttggggaagctccgcggagaagcccagcgattcggtcaggttggcctgcccgtcaaggtcgatcaaaagaaccttgtaccctttttgacgtaacgcgccgcccaggttgatcgtggttgtggtctttcctactccccccttgtgattcaatacggagattacttttgctttgctcataaattcagttttttaaatggttgtcatgtccgcaaatatagttaaaatactaatatactaaaatactaaaagtagtatttctcgttttttgcgtgttttttgtaccgatcggggaagcgtaccgaaataaatcctgtttccatctttcggtacgttttgtttctgtaccggaattaatcaaagattagaataaccataaatgtttttatacgttaatcatacgtatgtatatatgtatatatttgtttttgagtatctttgtgtgctataaataaaaaataaaagacatgagcacttattcgtataaaaatccgaagtttataaattcccctaaaggggtggttgaagttgtagaagtgatttatgacggcaaagatgatccggcctattcactggctattattaaatgggaaaatacctataaattaggtattcgttggaacatcgcttatagtgaatgggacgattaccgcaaacagaacgggcaagatgaatgtataggtaatccacagtcgagaggtattcccacctggtttgttttgcccgatgatatgatgtttggtgagaagttcagcggtgcgatgcagaggcttgatgaattaagaaaaggtaagtaagcaatggaacagggagaaatcatattataccagccggatgaagcggtcaagttggaagtgaggttggaagatgaaaccgtttggctgacacaagaacaaatagccgacttgttcgggactaaaaggccagctattaccaaacatttgaacaacatttacaaaagcggcgaacttgatatagatagcacatgttccattttggaacatatgggtaatgacggcaaacagagatatactactaaatattataatcttgatgcgattctgtcaataggatatcgggttaatagcaagaacgcaaccctttttaggaaatgggcgaatagtgtattaaaggattatcttttaaaggggtattccattaataaacgtttgtcagaacttgaaaggactgtcgctcaacataccgagaagatagaccatgatccgcttcagctttcccagcagcccgtctatcagcagccttgtcctgtaaaagcctgtctggtgcgagagctttgtcagttggttcagattgttcgccattcccgccaggctgcgcagcagcgcattctcttcaggcgtatgccttgccgtaacggtggccgccagtgccacctccctgatatagaccgccagactccggccggacttccttgccctgaatctgagagcctcgtagctgacgggggagaacttcactgtcactcccttggtcagcttccgcgtcctgcccagtgccggacggccgcgttttttcttcatctcattcatatcctttgtcatatgttttttctttttcgtccgtacttctttcattccaaaatctgcgaccggcgggagtggatttaccctccctgcaaccgccgggcgctggggagcaagggttttcgggaatccggaaacataaccttgctattactattacagaatccacccttcaaaacaacaggaaatattaatatcaatggtttcagataaccgtttccattcctggtccggaaggtgacaatgaaagtatatccgccggaggtgtacatatattttctacagtcatccgttccggctgatatacgaccggcagtcattcacacggtctgacagtcaccggtactctaaagtttcctccagcgttcgatgtcttgccggtaggtttcaagatgccgtcttgccagattctccagcagcccggatacgctcattccccggcagcccagtctcaggacgatcatgtccagggcactacgagtttcctcactgatgaacacggctttaggtcccttgattttagggggaatgagataagtttcccgatacttttccaaagccgggcgcttcggtgccttctccggctttgccggctgtgggcaggttccgtcaagtatctccctgagggtacttcccaacttctcacacaggacggccatacggtgcgtatgtccttccgccatcgtttttcccacaaggggcatgtcttcttttccttctttcatagaaacttggatttacgttgatacgatggtttcccatataccgggaaaccgattgtcgccggcaaataaaacgataaaaaacagacggatcgacacttagggttctgttggcgtattcttctgtatcattctctgcttcagggtgtacggacggtgagaacttcattattatacgcatcggaagcagggcatgaactttacggatgcagttgcaatcactaaagaccgattgcaaccattaatgattataaccggtcattaatggttggttataattattaatggccggttacaaacactgatgcccgcatcagtgtttgtccggcaggcatctttcagtccggatatggaagaacatcctgataaccggcctctttaccggaatgggacaaaactgatggacatccgtcatgttcataagcgtctccacgataacatttggcgcatctttctattgtataaatcaataaaagtacatcttatgaaaaagaaagatcgcttcgattccaattgaatatctattccggacatctgatgacatataatgacatctgatgaagggccggaaccatatccgggaacaatcatttactttgcggatgaaacaggcacgcatatggtgtcaaaggtagtcatcctgtcttgaaattcaggatgttccgctgggattcactaaattgcggcacggaatccggatccgaagagagaatgaaacagatgtcaaacctgaaattacagtgattatggaaatagtgaacattgaggcaaggaccttcgaggcgatgctctcggccttccggacgttcgcggaccggctggacaccctctgccggctgtacggcgacatagaggagaagaaatggctggacaaccaggaggtgtgcctgctgctgaaggtcagcccgagaaccctgcagaccctccgtgacaacggcacgctggcatatacacagatctgtcacaagacttattacaagcccggggacgtggaaagtatcatccggatagtggaggagcgccgcaagcgggctgaaagtatgggaaggtcgatctgaaaggccatgaaaaacgaatgtcgaacaaaaaaagatcaagtcatgatgaataccgataaccgtctgctcacccgtgagagcagcgagcatataagagagttcttctctaccgtcgagcgtctctccgtttccatggagcgtctctttgccggcaggtcaccggcgatggcgggcgagaacttctatacggaccgcgaactggctgaaaaactgaaagtgagccgccgcagcctgcaacagtaccgggacagcagtctgcttgccttcacccggctaggcggcaagatactgtaccgttcttccgacatcgagaagctgcttgacggctgctacagggaggcgagaaccagaccggaggaactttagaaaagttccgtacgggatcgtgaatgaaggggcgggcggttgtcataccggccgtcccttcgttttctttccaccggatgaacgactttaatttgctcataaagtatttatacacagagtgttttctttataaattatgatccggtgacgacattggcataacatggcgggacatggaaacatttttccggtatggcaataagatacggggattccattataaaaaaagacccttattttattatgtcattatgttattctgaaattggggcgggctgcccgtgtatcggtggaacggtccgttcctgtaatggcggcacatcccgtactgatatcattatccgccggcaatgttgtttcccggtcttgccggagtgaccttatgccggccggtgacaaccgcatgtccgtgtgtaaacatggcggcgcataaaaacaggcacaccctccgggctcctgtcccgtcggatgcgcctgtctccatcatgtcatatacagccggactactccggcccatgcctctatctgagtatcggattcgagagcagtatcttgtaataggccaccccgccaatctctaccggcatcctcgccatcatgaactgcacgctcttcctctccaccttcgcctgccgcatgagcctctgcacgataaacccggccgagaaccttgcgcatcttttatccttccagacgatgaacccctcgctgtcgtcggcccggcagatataccagtcacccgtctcgtcatcgtgggcgaagttcacccgtccaccgccgaggattcccaattcgattgacatcgtctttgacagatagacggttcccctgctgtcaaggttgatggtccgctttcccttgtatgtgacttcctgcggacgggagttttccctgttgtatactatcagtgccataattgtctttcttttatcggttgaactgttttcgtttttcaatacatgaagctttccaccgccagcatccggcttctccatgcgaaaccgctgtgggtacgtaccgcgtccactatcctgcatactttctgcgatatggccgatgccgagatacccatgcattccgccagtgccttgaacgagaactgcgcctcatagaacctgagcatgaacatccggtattcctcgtaggagaacttctgccttacgaaacgcagtatgtccttaaccagcctctcgcacccgttcaggtcgtcctcggaaaggaattttgcctcctcgccacatcggaggaagaaatcatcttcagggtgtgcataccggttctcccttttaatctttaccagggccgcctttttgtagcatccgatgaaatacgcgtcatagtccgttatgtcctttccgggaaccagcacctgccttcttacgaaaaggtaggtgtcatggaaattgtcctcgtccagcattccgtaccggcgtaacgtccctctcaacctgtcataggattttgtgaaccactcgttgaacagtctttccttttctgcgctcttgtctgccatagccttatgttttttttgagtcgtacatttgtacgttatacatggcctacacgggtaggcattcttatttcttgtgcttcctccagtttgtttttcggcggtctccggcaaggcttgccgtgaaaaaatacgctcacgcgaagcgtgaggaagattttttcacgagcaaccagcccgcagggccgccttgcgggaccggcctgaaaaacaactatttttgccgcaagaaatgaggatgacagattacttccttctatctattgtctgtccggtgagaatttagattccatgcagcttttctgtcttcggtatgtttggagaaatattcaaggatatgaaatgagaacggcaatacgtgatgttgcggaaggaatggatatgggattggaaacaggaagcgtgcccgggctttcatgcagtttatacggcggtgttgattttgaggaggatgacagggaagtgacaggatggtcggctgtcggaaaagaagcaataccggcggacgtggatatgggcaaaaccacccgtacatgcaatgcagagggagcaggagagccttcaccacagccggagccccttttcatgccgtatcccgacatgaaaaggggctcctggacaattcttttcctttttccttgtcgcacatgcactacgtcggtcgcagttttcgccttctgaatcaattttcccgtccgtcacccgcgcattcggagcgtttttccggcagaaaatttcaccgtacggaaattttctgccggaaaccggagggaaaacgcgcagatccgcggggacggcggaactttgatgaagaaggggaaaaatcactcgtcccgtaaatgccttccctcagatggcatcgcatatctccttctccatcttttccagcttatgggacaggacttccatgtcgctgctgatcttctggttggttatccgggcatatatctgggtggttttcaaatccgtatgacccaaaagacggcttacggtctcgatgggcacaccgtgcgagagcagcacggtggtggcgttcgtatgccgggcaacatggtaggtcagccgtatcttgaaaccgcactgcctaccaagttccttcaatatgacgttgcatctgctgctgctcggtaccggaaatacatgatcgtccttggacagccccttgtacttctctatgatgcgcctgggaacgtccagcaggcggatgttggactcggtgttcgtcttccgccggcgggtgatgatccagaggttgccgtcgaagaaggtctggagccggtcagtcgtcagcgccttcacgtctgcgtatgccagtccggtaaacaccgagaagatgaagaggtcacgtaccagttcgcaggtcccgcttttcaccgggacctccatcagcgtctgtatctcacgctccgtcaggtagccccggtcaacgctctcgaaggagttgatgtacccggcgaagggattgaagggaagtgcaccgctgttgcgggcgatggagatgatgtgcttgagcccgatcatgtaaccccatacggtattggtgcggcatttcttctccgtacgcagaaaatactcgaagttgttgatgaaggtcaggttgagttccttcagggggatgtcgtcacgtcggtacactttcgggacgaactcgcacaggtgcttgtatatggtacggtagcggttgtatgtcccctgtacgcggctgtgtcccactttcttgatgaactcctcgttgtgctgttcgaagagtttcagcaaagtctcccgtttcacgcccagtccgaggtagacatccctcagcctggcagcagtgacatagccgtcggactgcatcagttcctggtaacgacggttcacgtccacacgtatccggtcaaccgccgcattgattttctgtgcctcgacgctcttgccggtggcacgtgccgttttcacgtcccaaagtttcgggggtgcgtccagcttgcagctgaactgcttgatttcgccgtccaccgtaagacggcacatcagggggagatagccgttggctctctcgctgcccttcttcacgtagaagaggattttgaaagtcgatctgctcatactcgttttcatacttttttgattgttacaaagttaatatcaagcgagttgtctccaagtatgaaaaattgtgcaaattactgaaatataacctgttgtaccgtttcttgttcctattatatcagtaacgatatgggaactgaagtctttcgcaacttttatcgaacctcctttttcagcttatgcagtattatgagctaaacacctaactgattagtggactgcatttttgctgtattatcattaaccttgcctttttcttttacgtttattttaactactcgtaaagtttttcggcttccgcttttattaaagagctatttacgtccgcctccaaatacaactcctacggaaatattgaaatgccgattggccttttcttccaatttataattgaaggttacgcgaagatggtgaaacaactctataccgaaacgaggcatgagacagaatgaactacttgaaccaccgatgtcgtatgagttatcgccaattaaaattatgggtgctgcgttttcatgagaagcaagccctaaacccataccagcgaagaataaaatatttttcgatcttcgaaaattgtagtcaccaacaacaagataattaacagaggtgaatcctaatttcctgacttcatcagattgacggtgaaaaacatttccggcgacttgaactccgatatctataggcaaatgcagaaaattgtagcgtatttccccaaagcccattcccccggattttgcattgtcaaaattaagcttactggcgccaaaaactacgccgccaccaatctcgacttctatttggcgaatttctcgattctgcttttccgtaggtcggtaagattgggcattgacattgaggaggtgcagtaaggaaaacaagaaaataatcttcttcatagatgaactgatttgaggtctaaaaaaatgtgagaaaattattacgatttttttacgatcgtcattccgccccaactattgccaagacgtccggcaacatacacagtcccgaatttgagattcttcggtttgattttgaacttaccttgattgataattttcgcccactccttgaaagattgaggcatgtgattcagatccaagttaatcgtaaatgaaacttcgcttaaaaatatctcccttactttttttacatcgcctttgcgcttttgtccaccgggaagaatcgtaatgactttatctgcggagaagcattggatagcatcgagttgagtgatatcaacgttgctattttctacacgcaacttaaaccaatttctaatttgtatagggttcatcagcgaaagctgttgttgctgcagagcagtaatatccaatccgacaatcgtaagtaccatgccttgatgattgaaaccgggaatcgttttatattccgtactgacaatcgaagcctctgcattttttggataatcgggaattcgcttatagccttctgaaaaaataatattgctccaccctatgagtaattcgcttgcctgttttccactccaaccgatccaattctttttctgcatttctgccgacgctccgaattccgtataaaatttatagttgtaataataaaatttgcccttcatccgatgctttttcgataatttgtatgtatatccacggttacgcccgaagatgctttgccatagtttccccaaccatgttttggcatctgcattgaatctcggaaatctttcaaaaggaggtatttgtgtcgtaacagttcgtgttgtcatgttgagcgtattaacaatattagtcgaaaggtcgtcgtcgtcgagaacaccgggaagatcatccggcagatcttcggcttcagcatccaacacttcagttatttcaaatgtattgatacggtaaatatcctctgctaattggtaggtattctcttccatctggattccctcttcggtttcgaagcgttcataattactctcaaagaatttttgtttcgattccgggaagtagtaggttcctctcggtgagattttatatattgtctgatctaccattacctctgcgcgagcgttaagaagttttgctactttgatatttggcacaagagaatcataacctttagctatatagagcgacatatcgttattttcgataagtgcttgttccttgagcggtctgcaatccacacgcagaattggatcagttgcaatggggaggttttggactggttccagcagatcaacatatttttcatttgcagttaatcctccttgtgctttagttgcaaaacatgcgcgtgttgtaacatcatcatcttgttgattcagggccgcgataaaatcttcctccgatgagaaagacaacatggcgatattcgctatatccgtattattcccattttcagtttttgccccatcgaatttttgacatgaatagatagctaatatacagacaacaaaaaataagcattgatattttttcattttggtaattgatcaacttatgattagtgttatatttctaagaattcaatatgccctgtgtaaatcgtaccgttttcatattcgacggtaatcagataaaccccgcagtcgagatccgacacgtcgagtgtcgcagtctgatcggtgaaattcaccatttccgtaagataggttccattgccggagatcgtaacgaatgcccggtcgcaattctccggagagtggagcgtaatggtgttgccatctgaagaaagcaccgcattaatcggcggcatgacgctgcgcggacccttaaccgtcattttcttttccagataaacggacgtggttttcggtcgtttccgatttgcatacgcttcaaagcaaattccggctccgatgcagcacagcacaagtaataaaagtaattttttcatgtgataagatatgtgggttagacaatagtaaagttaggctttcggtttcttccgatagcaaaatcagcgccgataaaatctatcacacaaagccactaaataattgatatacaaataaataaaaactgcaagaattgcataaatctcgcagtttttataatgtatgcgataattgcctgaaaaacaaaatattacatgttaatttttttggagtttttcaacggagggggggggtaatttatttgacaatcagcgtgttactatattttctgaataaaaaagtccttttcggccgaatccgacgccgcaattcgggctttcaatctcgatttgcggttgtagacattcgataccgaatcgccgattataacgctgatgatttgcgccgagaatccggcgtagatgtaacatagcaaatctatatccgcaggtttgaatttcgggaactgcttccgcagtttcacgatgatattgtcatttaccgtgtttacgatctcctccaattcttttttggtcgcgggattggatgcaaggttcgtaaagaagtttctcacttgtttgtaaatgacctcctgctgcgcttttgtattgtttcgttcatagaacgcccggccgagttggtcgaggaactcgaagcgggacaacaccaattctttaagttgcacctcctgtccctccttgacggcaagatgttcgaggatgcggttttttgatgcccggatggtgtcaacggccaacatgtagcgttcaacctgctgctgctttcgtttcatgcgttcccgatagtagtagatcaggaaaattgcgacggtgcagatcagcagtccgacaatatattcaaagtaagttcgtactttcaggcggtaactcgcaaaagcagtttgctctttataatatttcccctcggcgcggttgctgattgagataccaccatgcgggatatggaatcgctcaaccagatatattcgttgatcgaattggctgcttcctctgaatttccggatgccaattcaatttgaatagatagatatgccagttgtgcatcgtcccgaatatcctccgccaactccgaagcgatattgaaataatatcgtgcgctgtctatcttgtgttgcagataatatactttggctaatactctatattgataaattgaaagaccatctggagcggtccgttcaatttcctttacggcctgcaaggcttttggataatcgccctcatttacataaatatcccccaaattgcttaaacaagcaataaccatatcgttatcttcctgctgtgcggctgcttgcagagcttgcgaatagtatttcacggcattgtcgttatcgcccaaactggaataggcattggcgatattaagtgtcgcattattcataaacgcaggcttgcgtagtttttcccaagcgccataagcattccgataatattccagcgctccgttaaaattcatctgctcggaatagacctccccgatacgggagtataccaaacccagataataattcttatgcgccgcgaaagcgtatttttccgcagtcagataatagcgcatggcttcctgataatcgtcgccgttttgatagattcgcccatagtgatagttaatcagaaacttcaccgaatccgaacaaatccggttgtcgtaataccggtatgcaatgcgtatcagcgaatcatcatcggcatccacataatttttatcgagtgccgcggaatacaagagagcgtattttgcccgcgtgctgcgccgcagaatccggtcggggtcaatgttctcgatgatgcgcaacgagctgtccggttcgatgcgtaacaatcttgtcgcagtagacaattcttgctcgatttgcttattgttgccacagctgaataggagaaaacccgttaaaaaagataataaacctattggcggaattaaattataaaagatttatgtttaaaaagttgtgcatattattgatatttagtaaattaaatgagatcaaacatttaatagacaaatatcgtatgcacaacttatatgcaatattcgcaaaattactgaacatatgcaaacaaattgccggcaatttagtcaatgaatctgggaatgtgccaagacgaggagtcgtccctaaattctcagaccttgaagtagtggctttgaacatggcatcagaggctgttggtattgacagtgagtcgctgttatttgcaaatctacaggaatatagagttgaaatacccaaccttatttcccgccgacaatacaatgacagacgtaaaataacttcctccctatgtaatgcaatccgagaaagaatggttgctaaaatggatggtggtgaagactatttctgtattgattcgaaaccgatagaagtatgtcgtattgcccgttccaaacgttgcagtatgggaaagaaggattttagtaaagcacctggggtaggctactgcgcatcacaaagcatgtattactatgggtataaactccatgcagtctgtgggttaagtggtgtcatccactcctttgacctcactaaggcaagtgtgcatgacattcattacctgaaggatgtgaaagtggattatagtaattgtacagtcataggggacagaggatatataagtgcccaagtgcaattggatctgtttgaaactgccaatatcagattggaggtaccatacagatgtaatcaaaaagaatggaagccaacattcccagcttttgccaaagcgagaaaaagaattgaaaccctattctcgcaattgtgtgaccagtttatgattataaggaattatgcgaaagatacagatggattgtttgcccggattatcgggaagattagcgcacttacaatcctccaatatattaattacaaaaatgaaaagcctattggcagagttaaatatgcgctattttaattccgccaacgggtaataagtatttcataattgtcaaatctaatcataaaaatacatatattttttgacatctatttctgaaagaaaattatatcgaaaaattcttaaatttgataatatattgacttgccattttatcatcgatatattttattcatcttaaataaaaacagaagacgagtacaaggttcagcactttgtaatcgtccagctgttatattgttataaagaatattatctaattttattacccttgatgcttttcagtataatttgcctatcgcgaaaattttccgtatcttgcaaaaggttatttgaaacgcggtatttcagcgcaacagactgaaaacaaaccgttgccttttcgttacctactatcttatacaaaaatgtaacgacccgatgaatcaggtcgttacatcactttaatcccacaccccgaaaggcccgctgtctgccttgaagaatccgtacggattccccgtttcgtaaaggcaggtcacttggcatacagccggaacttcatgcgccagctttcgcccggagcgatcgcctgaaaaccttcggccgcagggtccgcggcgttcggggcgttcgtcgtccacgactgcggttcgggacagcagtagggcacccggccgccgttgttccagatcgtccaataggtcgtctgccgatcgacctcgtagaaagtgcggacgcccgtacggagattctcgaccagcgcaccccggaaaggcttgccgtccacctcgatttcgcgcagcgtgaagcccgcttcgatcggttcgcagtccgttacccgcaatccgccttcgcgcagtctggcgaactgttccgacaacggcaacttacgccctgtcgggatattacgcccgctcatctcaacttgttctccaactgcgacgcgcatcacataatccgccgcctcaccgcccgcaaagggaatctgcatcggcgtatgaaacccgacgcccacgggcatcgactccgcactgcggttggcgaacatcacctcctgctccagcccttgggtcgtaaggcggaaagtgatcttgcatttgaactcatgcggaaaatcgcggaaaatcgcgtcgtttccggcgttcgaatagtagcggcactccaccagcacctcctccccggtctcccaagccttcgacacggcgaaaggctggctcttgaggatgccgtggtggtaatggtgctctttggcgttcgtgatgggaaagcggtaagtccggccgccgaacgtataacgcccgtcctcgatccggttgggcggaaacaggatcggcagtccgaagacatgcggccgtcccttgaacgtttcgacctcgtcgtcggccggcgcccgcagaatctcggcgcccagccgcgtattggtcagccggatgaggtttgcgcccatgcccggaatcagcagggccgtatagtcgcctttcgagaactcgacggcctgcatcccatgccagtcggtactgcggagcattttagagcagtttttcgatcttctccgcgagtgcggccttcgacgcggcgccgacctgcttgtcgaccagctcgccgcccttgaggaagacgatggtcgggatgttgcgcacgccgtatttcatcgtgatctcatcgttctcctccacgtcgcatttgccgatcagcacgcggccctcgtattcggcggcgagttcgtccacaatgggagcgatcgtgcggcacggaccgcaccactcggcccagaagtcgatgacgacggggagctccgatgaaattacttcctgaaaattctctttcgtgattgctaaagccataattattaagttttaaaatgttattatgcgatggaatactttatctcgttatcgtccagatacgaaaccagcgactgcgtcaggctcaccttgtggctcttcgagaagagactgagcgaaacatgcgcttcgcggtcgatcacgctgatgcggaaaagggtctcgccctttgcctccttcaccttctccgtcaattcgcgtaccagcgtcggggttacgtcctcgacgggcagcagcacgttcatctccttgatcatcgtgtcgcgcatctccgagagctgcaccatcgagatgatcttgaactccagctccttgtcgttatagggtttgggctggacccgtccccggacgaagaggaaataatccgagaagaggtacttgcggaaattctcgtaatccctgctgaacagcgcgaattcatgcgtgccgttgtaatcctccagcacgaatttgccccacggcttgccggtcttggtgatgaggttctgcacgctgacgaccatacccgcgacagctatctcctgccccttgagcgcttcgaggttttccagctccgtgagctgggtcttgcacatgtggttgatgatgatcttgtagtcgtcgagcgggtgcgccgagaggtagtgaccgatcatctcgcgctccttggcgagcgtttcgagctggctccaatcggcgcatgcgggcagcacggggcgctggatgtcaacgtgtccgccgccgccgaagaggctctgctgggcgttgttcttctcggcctgaaaacgctggccgtaacgcatcagctgctcgatgaaggtcacgcccgtattgtcgcgcgcgtccgcaccgaagaacttgccgcggtggaagcccgatatcgagtcgaaacctccggcataggccagattctcgaaacacttgcggtttacggccgagaagttcacacgctccatcaggtcgtatatgtccttgaaacggccgttggcgttgcgctccgcgatgatgctctccacggcggcttcgccgacgcctttcacggcctccagaccgaagcgcacgtcgcccgccttgttggacgagaaggtgcgcatcgactcgttgatgtccggaccgagcacacggattcccatgcgcttgcactcgttcatgtagagcgtgagctgcttgatgtccgcgaggtttcggctcagcagggccgccatgaactccgaagggtagtgggccttcaggtagccggtctggtaagcgacataggcatagcaggtcgagtgcgacttgttgaaggcataggaggcgaacgcctcccagtcgccccagatcttgtcgcagatcttctcgtcatgtccgcgctgcttacacccctcgatgaacttgggcttcatcttgtccagcacgtcgcgcttcttcttacccatggccttgcgcagcgtgtcggcctcgccgcccgtgaagccggcgagtttctgcgacagcagcatgacctgctcctgatagaccgtgatgccgtaggtgtcgttcagatactcctccatgtcggcgatctcgtaggtcaccggctcctgcccgtgcttgcgggcgatgaagttgggaatgtactccatcgggccgggccggtagagggcgttcatggcgatcaggtcctcgaagcggttgggcttcaggttgcgcaggtgctttttcataccgggggactcgaactggaacaggccggtcgtgtcgccgcgggcgaaaacctcgtaggtcggcgcgtcgtcgagcgaaatgccgtctatgtccacatcgacgccgtgcaccgccttgacgttctccacggcgtccttgatgatcgacagcgtgcgcagtcccagaaagtccatcttgatcaggccgacgctttcgacctccttgccctcgaactccaccacgttcagctcggcatccttggcaatggccatcggcgcgaacttttcgaggtcgtcctgaccgatgatcacgccgcaggcatgcacgcccgtctggcggatcgagccctccagcttctcggcgtatttgagcgtattgcggatcagctggttgggcgactcgcgctcggcggccagctccggagactccttgtagacgaaatcgaacggcgtctcgccgtgtttcttgtcgggcgtgaccttgtcgggcaccagcttcgaaaggcggtcgctttccgagagggccagcttctgcacgcgggcgacgtccttgatggccatcttgggggccatcgtgccgaacgtcacgatctgggccacgcgcttctggccgtacttctgcacgcagtagcgcagcacgtcggcgcggccgtcctcgtcgaagtccacatcgacatcggggagggagatgcgttcgggattgaggaaacgctcgaacagcaggtcgtatttcagcgggtcgatattggtgatcttcagacagtaggcgaccaccgaaccggcggccgagccacggccgggtcccaccgacacgcccatttcgcgtgcggcgcggatatagtcccacacgatcaggaagtagcccggaaatcccatccactcgatcgtgctcagctcgtatttgatgcgctcctcggtcttttcgtccagcacgtcgccgtaacgcatgtgcgcgcccttgtaggtcaggtccttgaggtaacagtactgtttggcgaccatcaaccggtccgaaagctccttgtcgccggccaccagctcctccagctccggaacggtggcgcaggcgccgatcttcgccagcatctcctcgtcctcgatcttcttgacgaacgactcgcgcagttcgccgagggcgatcgggaaatcctccggcggcgggaagttgggcatcagcggggcgtgcgtcagcttgtaatcctcgcacttgtcggcgatttcgagcgtcgtggccaacgcttcgggatggtccgggaagagcgccgccatctcttcgggcgacttgagatactcttgaaacgtatagcgcatacggttcggatcgtccagatcgcggcccgtattgagacagatcagatggtcgtgcgccacggcatcctcggcgaggatgaagtgcacgtcgttcgaacagatatacttgacgccgtatttggccgccagctccagaatcaccttattgacgcgcagctggttttcgtagacgtccgcgtccttctgcggatcgcccgaagggtgcagctgcagttcgaggtaatagtcttcgccgaagatgttcttgaaccactggaccacgcgctcggcctcctcgatgtcgttgtgcatgatggcctgcggcacttcgccgcccaagcacgccgagcagcagatcagcccctcgtgatactgttcgatcagctgcttgtcgatacgcggcttgtaatagaatccctcggtaaacgagtaggagaccatcttgcagaggttgtgatagccttcgaggttcttggccagcaggatcaggtggtcgccggccttctcgtccttgtccttctcgaagcggtttttcaccacgtagacctcgcagcccagaatcggcttgaccccggcgtccgtggcggtatcgtggaagttcttgacgccgtacatgttgccgtggtcggtaatggcgatggcgttcatgccgagggccttggcccgcttgatgagcggcttgatggcggcggcgccgtcgaggatcgaatactgggtatgtacgtgcagatggacgaaatcgggcatggttctaactcctgtttttatggctgaacaaagatagcgatatttccgcagatttcgtggcagggctattgcattttatcaacaaaatgcttaactttaaatatccaaccaataccgagaaattatgcaagacgaaaccatggttgtattagcggaatacaacaccatcaccgaagccgagatcgccaaatcgatgctcgacagcgcaggtatctggtcgatgatccgcaacgaatatatgtcggccatataccccataggcaccatgcccgcacaggtcgtcgtccgcgaggaggacgccgagaaagccaaagcgatgctgcggcacagatagaacggcaagagcttccggaggttccggaagctcttgttttatcgtcggggcggtcggcccgccaacgggacggtctcacgcttccgccggccggattcgtctccgcccggcgttccgggagcgtcattcggccatccccagaaaattgaccccgtattcataggcggtccgctggggcactccgcgcaccttgcggggcgtccatttgcccttactgctcctgatgacgcggatcatctcgcgcgacagcttctcgtcgggcgacttgattacctcgccgatggtgattttcccgtcgggttcgatgtagaagcgcacgcgcacgacgccttcgcccttcgcgccgcggccggtgaaccttccgtcataacgcaggcgcatcgtcagccgccagctgtaggtcgtcggcttcccgtccttcatcgccggagtccacttttcgagccgccccagcgcctcggtcatcgcctcgcgcgtggggggcgtcgccggctccacgccgaccgaatcctttccttcgcacgtgttgtccagaaaccgccactgcgtcacatttcccgtctcatcgaccgtaaagccaacgacgacctgcgacgaaaactcggcggcgggaatctgcgccgcatcgacgatcttctcggtctcgccgataagacgcgccataaaaacgcttcgcatccgacccctgaaagcggggcggcacggtctcctgagccgcggcgccgcaccacacggccagcgccgacaaacagatagccattcgcttcatactgctgttgtttttcaaggtcattcgttccaaatccgccacgaggcctcggcctgttcgcacagcatcgtttcgccgttgagaatatgcgccccccgctgacgtccgtagtcgaggaactgcgtcaggggcgggttgtacaccagatccaacagatagtgtccgggcgtcacgaaaccgtagggaatccgcggcgcggcatcgacggcggggtaggtccccacgggcgaagcgttgacgatcagacggctccgctccacgacttcgcacggcagatcgtcgtaggtatagttgcccttcgccgtgtcgcgcgacaccagatcgaacgggattccgcgctcggccaacacatactgcacggcctgcgaagcgccgcccgtccccagcaccagcgcatgttcgggctgttccccgcccagcagttcgtcgagcgaggcgcgcagtccgaccacatccgtattatggcccgtcagcgagccgtcggccgcacggcgcacacagttcacggccccgatcatccgggcgtcgtgggaaagggcgtcgagcagcggcatcacctcgcgtttgtaaggtatcgtgacgttgaatccgcacaggtcgggcgtacgggccagcaacccctccagcgcgccgatgtccggcagttcatacagcgcataggcgcagtccgcaatcccttcccgctcgaatttggcggcgaaataggcagccgaagccgagtgccccagcgggcgtccgatcagtccgtaacgacgcatggcctactcctcccgttttttcacgacgatacgcgccgccagctcgatgcagtagatcgtgagaaaccccacgacgcagagcacgacggcctcgcccagcagggcgtcctgctgcgcaagggcttcgaaacgccccggcgcgacgttgcgctcaacgagcggcatgatcttgccgtggctgtcagtataggtctcgacgacctccttccacggccacaccttgttgagcgaaccgaccatgaaccccatgagcaccgcgaccgtcacgtcgtgccagtgcttcagcagccatgagagcaggtgcgaaaagctgatgatgcccgccgcggcgcccacgacgaaaatcacgatgacgggaacgttcagatcgcccacggcctgcatgatgaactggtacttgcccaacagcagcaggatgaaggcgcccgaaataccgggcagaatcatcgcacagatggcgatcgcgcccgaaagcaggataaaccaccacgtatcgggcgtctcggcgggcgtggcgacggtgatccaccacgccgcggcggcgccgatcagacatgccgcgacggtctgcacccgccagcgtccgatctgcttggccaccagcagcgccgaagcgacgatcagaccgaagaaaaacgaccagatggcgatcggatggttcgtgagcaggtaggtcatcagccgggccagcgagaaaatcgcaatggcgatgcccagcagcacgggcagcaggaatcggccgttgatatgccgccagaattctttcagccgcagcgtgccgagcagccgcagggcggtggcgtcgacgcttttgatcgattcgatcagttcttcgtagatgcccgaaatgaaggcgatcgtgccgcccgaaactccgggaacgacgtcggccatgcccatggcgcagcccttgagcgtaagtaacagatattgggaaaacttcataatcctgattttagccacaaatataataaaattgcgggaatcgcacacactccgccaacagacgctccgcacgaagagagcgtgcgacaggtttccggcatcgaaaacacccctgccagagccaaactccgacaggggtggaatcgttgaaaccggacatgcccgacagccttattccggccgggaaggctatacgccgaccttctcgcgctcccggcgctcgaagaattcgggtttgctgcgccggataaaagcgacgacctcgctcagtccgtccgaaaatttctcgaaatcctccttatacaggaaaatcttgtgccggtcgtacgaaaaactgccgtcggggttggtcaccttgcggctctcggttatcgtcaggaaatagtcgccgccgcgcgtgccccgcacatcgaaaaagtaggtgcgccggccggctttcacggccttggtcagaatctggtctccatattcctccgcgtcgcggcgaggcgttgtctggggtgtcatggcgtggtagttttgggattgggctaggattaattttgtataacgaatataagcaatttaatcctaaaatccaaaactttccgccttaattttcaggcatcagcagcggggctccctcacgttcccagccgccgagaatctccaccgcacgccgataggcgccgttctgcgccgggttcatcacccggtagaaagcccccgtatcgaacagccgctgcgccacgagcgccttcagctggacgcgcatcagcggctccgatgccgcaaaacccgcctcgtcgaactccacgccgcgctccgcccccagcgccgtcaggcccgtgagcatctccttcccgacgccgaaagcggcgtcgaaagcggcgaaatcggggtaggcgcgctccagcctgccgcgctcgcggtccatgtacgagatgacgtattcattgaccacgccgcggcggatcagattggcgtagtaaaccgagaatcccgcagtatcggcttcgaccatgacatcgggacggatgccgccgcccccgtagaccgtgcggcccgtgcgcagggtccggtactccggcgccccggcgtcgagcgaatcgcgcaccgcatcgtcgtagcggcgcaggtggtcgaggtagtattcgcggcgtttgcccttctcgtagggacgctggatcacacgccccgaaggggtgtggtaacgggccacggtgatacgcacggccgagccgtcgccgagtccgatctgacgctgcaccagccccttgccgaagctcggacggcccacgaccacgccgcggtcccaatcctgcacggccccggcgacgatctcgctggccgatgccgagttctcgtcgatcagcaccgccagaggcccgtcgggcgcctcaccgtcgtgcggattgcgcagcgacatcggcggcacggcgcgtccttcggtcgagacgaccagcgcgccccgcggcaggaagaacccggccatttcgaccgcctgctccagcaatccgccgccgttgccccgcaggtcgaggatcaggctgccgggtttgcccagtttgtcgaacgcctcgcggaactccgacatcgtcgtacgtccgaaacgattgaccttgatatagcccacgccgtcggcggccatataggccgcatcgaccgtgttgagcggaatcttgtcgcggacgatcacgaaatgcagcggcgccggctccccgtggcgcacgacgtcgatttcgacccgcgtgccggtcttgccgcgcaggtgcttcggcacgtcggtctgcttgaagcccacggcgtcgagcgtgtcaatgcgcacgatgcggtcgttgggcatgacgcccacgcgctcggcaggcccgccgacgatcgtattgaccacgatcaccgtatcccgcagcacattgaactcgatgccgatgccgctgaactcaccgtcgaaactctcctgcacgcccttcatatcctccgcgccgatataggccgagtgggggtccagctcttcgagcatcccctcaatggcgctttcgaccagcggccccatctccacctcgtcgacatacagcccgtcgaggtagcggtaaacctgcatcagtttccgcaactgctgtgcggccccggtctcctgcgccgcgagaggcagggcgaaaagggcggtgaagaaaagtaagacgatacgcatagcgatagaattttaagattcgacaatttaaaaaaccggccgtactgctccggacaagccggtgccgcagcacgaccgggatatcggttttcggggtgcgcctaacgccgggactccaaatccgctgccagagcggcgaaaggtacctgacgctgctcgcccgaacgcatgtccttgaccgtcgcggcctgcgtctccagctcctgcgagccgatgatgaccacgtaggggatgctccggcggttggcgtactccatctgtttcttcatcttgccgcactcagggtagatttcggcggcgacgcccgcatcgcgcagcgagcggagcagctccagcgacgcggcctcctcctcggcgccgaggttggtgaagaacacccgcgtcgtgaagctgacctcttcggggaaaaggttcagccccgtcatcacgtcgtatatgcggtccgcgccgaacgaaatgcccacgcccgacatgttgggcatgccgaaaatgccggtcaggtcgtcgtaacggccgccgccgcagatcgaaccgatggcgaaatcgagcgccttgacttcgaagatcgccccggtgtagtaattcagtccgcgcgccagcgaaagatccagctccaccgtcaggccgatgcccgaccgctgcacgtagccgaacacggtctccatctcctcgatgcctttcaggcccgtctccgagaccgccagcacctcgcgcagtttcgtgagcttctgcgaattgtcgccgctcagctcaagtatcggttgcagtttgtcgaccgcctcctgcccaagtccgcgctccagcagttcggccttcacgttgtccagcccgatcttctccagcttgtcgatggcgacggtaatgtccatcatcttgtcggcgtggccgatcgcctcggcgatgccgaaaagaatcttgcggttgttcatcttgagcgccacgcggatgcccagcgcacggaacacccgctcgacgatttcgatcagctcgacctcgcacagcagcgaccgggtgccgataacgtccacgtcgcactggtagaattcgcggtaacggcccttctgcggccggtcggcgcgccatacgggctgcacctgataacgcttgaacgggaacgtcagctcgccctgatgctgcacgacgtaacgcgcgaaaggcaccgtaaggtcgtagcgcaggcccttttcgcagattctggacgcctgacgcacctcgtcgtccgacagccccgcggcgtaatcgcccgaattgaggatcttgaacagcagtttgtcgccctcctcgccgtatttgcccagcagcgtcgaaaggttctccatcgagggcgtttcgagcggcgcgaagccgtaggtgcggaacacccccttgacggtgtcgaaaatatactggcggcgcatcatctccgcaggggagaagtcgcgcgtgcccttgggtatggacggtttttgtattcccattttatttcgtgtttatcaatctttgtgcggactactcttcgatcagtttgcggtatttcacgcggtggggcgtcgtatcgcctccctgcgccttcttccactcctcgtactcgctgtacgatccctcgtagaagaccaccttcgagtcgccctcgaaggagaggatgtgcgtggcgatacggtcgaggaaccagcggtcgtgggagatcaccacggcgcagcccgcgaagttttcgagaccctcctccagcgcacggagcgtattgacgtcgatgtcgttggtcggctcgtccagcagcagcacgttgccctcctccttgagcgccagcgccagatggagacggttgcgctcgccgcccgacagcatgccgcacttcttctcctgatcggcgcccgaaaagttgaagcgcgccacgtacgcgcgggcgttgacctgccggttgcccagcataatcaggtccgtgccgcccgaaatcacttcgtaaacggttttctcagggtcgatcgacttgtgctgctggtccacataggccagcttcacggtcggccccacgcggaacgatccgcccgtcggcgtctccagccccatgatcatccggaagagggtggtcttgcccgtaccgttgggtccgatcacgcccacgatgccggcgggcggcagcgagaactccagatgctcgtacagcacccggtcgccgaacgccttcgacacgtcgtgcgcctcgatcaccacgtcgcccagacgcggaccgttgggaatgaatatttcgagtttctcctctttctgcttggcgtcctcgttcatcatcttgtcgtaggccgacagacgggctttcgacttggcgtgacgccccgacggcgacatgcgcacccactccagctcgcgttcgagggtcttgcggcgcttcgactcctgcttctcctccatggccatgcgcgtggtcttctgatcgagccagcctgagtagttgcccttccacggaataccctcgccgcggtccagttcgagaatccagcccgccacgttgtcgagaaagtaacggtcgtgggtcacggcgatgaccgtacccttgtactgctgcaggtgctgttccagccagtcgatcgactcggcgtcgaggtggttggtcggctcgtccagcagcagcacgtcgggctgctgcaacagcaggcggcacaaagccacgcggcggcgttcgccgcccgacagcaccttcaccgactggtcgggatcgggacaccgcagggcgtccatcgcgcgctccagcacgctgtccagctcccagccgttcacctgatcgatctgctcgtacagctcgccctgacgctcgatgagcttggccatcgtgtcgtcgtccatcggctcgcagagcttcatgtttatctcctcgtactccttgagcagggccaccgtcgcggcgcagccctcttcgaccacctccctgacggtcttcgagtcgtcgagcttaggctcctgttccagatagcccaccgtgtaacccggcgagaagaccacttcgccctgaaagttcttgtcgatgcccgcgatgatcttcatcagcgtcgatttacccgaaccgttcagaccgatgatgccgatcttggctccgtaaaagaaagagaggtagatgttgttaaggacctttttctgattggtgaacgtcttcgaaacgcctaccatcgaaaagatgattttttcgtctgccatattattattgttcgttgttccgattttcctatccggcaaagataataaagattccgcaatcttccgacacgaaacgacaaattagggtcgggaaccgcacaccgttccgaccgagagagagccggctttccggcagggactccctgcgccgcaaaaaaagcggccctgcaccgttccgatacagggccgccagcttgcgaactccgtcaatagttctctttcttcggctcgaagtaggcctgcggatgcttgcaggcggggcagagcttgggagcctcttcggcttcgatgacgaaaccgcagttgcggcactgccaccagatcttgccgtcgcgcttgaagaagttgccgtccgtcaggcggctcagcagcttgaggtagcggcgctcgtgctcggcctcgacggtcgagatcatcttgaaggccgtggcgatttcgatgaagccctcttcctcggccaccttggcgaactcacggtagagaacatcccactcctccttttcgccgtgagcggcagccagcaggttctcggcagtggttccgatcggaccggtggggtagctggccgtgatctccacgtcgccgccctcaaggaacttgaagaaacgctcggcgtgctccttctcctgttcggccgtctcggcgaacacgcctgcgatctgctcgtaaccctcctttttcgccttgctggcgaagaatacgtaacggctgcgcgcctgactttcgccggcaaacgccttcagcagattctgctcggtccttgtacctttaatgctcttttccataatcttatattgtttagtgtgtgtcgtttatttccgtacagcaaagataggaaaatccccgacaattcgccaaattatcttcatcgtttgtttttatacggctattcggattacttatagacccgatcgagcatctccgccacgtccttccggaacagggaataggccgccggcagagccatcgtgtcgccgacctcaggcggaacgatccggtagccgggcatcgccacccacaccggcaccgggtcgagcgtataggtcatacggccgtcgggatgccgcacggcttcgatttcggccatcagccctccgtcgcagtagcggcggcgctgattggagacgaagttgcccagcgaatagagcaccacgtgcgacgaatcggtctcgaagggctgcaccacgtgcggatggcttccgacgatcaggtccgcgccgttgcggcgcagaaagcgcgccagccgccgctgttcggcattcgcctgccgttcgtattcgttcccccagtggatgcagaccgcgatgcagtccggcgatccctcgcgcgccgcggccagatcggccgccatgcgcagcgtgtcgatcaggtttacccgcacgccctccggcacggggattccattggtgccgtaggtgtagttgagcagtgcgaagcgcacgccgcagtgttcgagccaaagcggattgttggccgcacggtcgaggctgtccgtaaatacgcccgtatgccggatgccgcaccgccgaagttccgcgacggtcgtatgcaccccggcgccgccgccgtcgcagcagtggttgttggccagcacggccacatcgaccccggcgtcgcgcagtgcgtcggccagcgccgccggagagcggaaacagggatagcccgtatagcggtcggtgcgggtgagcgtcgtttcgaggttcacgatcaccagatcggccgcacggaagcggcggtgcagatgagcgaacacctcccggtagtcgaaccccgtttcgcggcgggccgccgtgacctgcggcagatgctgcatcacgtcgcccccgaacagcagccgcacgcgcaccggcttgggcggcggaagggcaggcttccgctccgactgcttcgccggaacgcagcacgccgccgccagcagcagccatggaagaatatgtcgagcggatattttcatggtatgcgccccaaagttagctttccgtacgataaaatccaaaaaccgcactatatttgccgtcccgaaccgccgagcacggtttttgccgtcgttcgggatgccgcgcggcgcaggccgcggcaaaaacgcgcagcggtgcggcgggccgcttcgcaacgccgccgtgcaccgcaggctccggcccgcacccgccgttccgcatctgccggcggcggaagggagcgcaccgcgtgcagacacggtgcagccatgacagacgccaacgcgaaaaaacgtcgaacatatgcgtaacataagtaatataaagggagtgctctacgccgttgtctcttcggccacgttcgggctgatcccgctcttctcgatcccgctgcttcatgcgggcatggcctcgccgacgattctcttctaccgcatgctgctctcggcggccatcatggcggcggtggcgttgctgctgaaacgcaacttccgcatctcgcggcgcgacttcggcgtactggccggcctgagcctgatgtacgccgccacgtcgctgggactgctgcgctcgtacgattacataccgagcggcgtggccaccaccgtcaattttctctatccgctggtggtgaccatcgtcatgacgctctttttccgcgaacgcagttcggtgtggatcgtcatcgcagtcttcatttcgctcgtcggcgtggcgctgctggcgtggggggacgcgggaaacaacgatccgggacgcggcctgatctatgccgggacgaccgtattcacctatgcggtgtatatcatcggggtgatgaagagccgcgccggacggctcgacccgctgatcgtggcgttctacgtgctgaccttctccgccgcggtgtttctggtctacgccctctcaacgtccggcatcgcggtagtccacacatggcacatctggcgcaacctgctgttgctggccctgctcccgacggtgctctccaacctgacgctggtgctggcgatcaagcatatcggctcgacgatgacttcgatcctcggctcgatggaacccctgacggccgtactggtcggcgtcgtccacttcggcgaacgcttcgacctcgactccgcggccggactgattctggtcgtcacggcggtcatcatcgtcattctccagaccaatcacacgccccagacgccgccggcaaacattccgcccacgcagccgcaggagtaagacgcttccgccttacacagccgaaaatcgcggccgcagcccgcgccattccgcgccggacggcgactcactgcccgcaggcgatccgccgcgtcgcgccgactgccgttcaggaccggctcggcggcaggcagacgcaacggccggatcatttcttcttccggttcggattggccgggaaccatcccttcgccacacgtccgcgctgctcgaacagctcgccgatcgaccagagcgacgacgcgccccagacggccagcagggtggaccagaggatatgccgcacggcgaccgacgccgcgatcgccgcgacgcccatcagcaggaaaaaccaccagcagcgtacgccgaagtaatattcgcccttgattacgaaggggtggaacagaccgatgatcagaaacgtagcgacgccgatcaccagccccgtaaggttgtattccgtcagaaattccatcatgattcagcaacagtttgaaagcaaatatacgaaaaaaaagagcggcccgcaccggaccgcccgaataaatgacgccgacaaggccgtcagaagctgtactgcaccatcacgttcacgcggttggcgtggttcttcatgctgttcatgtccttgcgcgaaccgtagaggtactcgccggccaccttgcagcgcggcgtgagcgaatagaagatgttgccgaagatatactgcccctgcttgtactggtcgtcggtgtaatagccgtggctgcgctgcacgcggacggtcgaatagccgcccgaaacgaacaggcgcggcgtgatgttgatctgcccggcggcctgccagccccacatcggcatcatgcgcacgagcgacggatcttcgggattgggcgtgaagtcaagtcccgaacccgtcaggtcctgaatatagggggtgatgccctcgccgtaaacgccgttcatgaagagccggaaccagtcgcagcacttgatcgtaccgctgaactgcacgccccagccgagcagcgaggtggtcgaatttttcgagaccttgtgcatgtaggggttgcggatgacacccgacgcgcggatatggctgctgcggtcgtcaccccacgcatactgcagatacatcgggaagtcgggcacgcgctggtgcatcggcttgaagttttcgccgtaggtcgcgctcacattgggcatttcggccgcgacgccgaaggtcatgtgccggcgggcgaacgaaacctcatagcggatcatcgtggcgaaattgaagttgtaggcgttcggtccctgaaagtcgatggtcgtgggcgcggcctgcaggtcgcagaacgtcgtcacgtcgcgtccgagggtcagccccttgaacgacacgtaagccgagcgcaggcggggcgtatagctgccctccgcgccgccgcggaagtcggcgtccatgtaaatcaccacgcggcccagcgcccgcgtgttggtgatcgccttcatgaagagacgcgaagtcgaggcgtccatcatcagcttctgtttcgaattgtaattgcccggaacgggaatgtcgtagggcacgaagtcgatattgtccacgatgccgtcgaagtcgtatccggcgcgcaggctcacgaagccgcccagcgagaacgagaaccggttgttcttcgacgcgaatacgaactggggcttctcggactgctggaaaccggggcggtgcgtctcgatatagtcctgcgtggcattgtccatcgccagccggttgagcgccgcggcctgacggctgccgcagccgccgcagttgtaaaccgtgtccacttcgtgcacggagataaggtagaccgtgggcgaatactctccgttgcggccgtcgcgcatgtgtcgctgggccgaagcggaagacgcaagcagcagagccacaatcaaaagtcgaaatgttttcataagctgaattgatttggttttaaatttgtccgatatgttttgtttttggagcacaagcagttgatgttcaaacccccgatcagcaagttatatgccaaaggatcccgcacgccattcgatctgccggaacgcgcggcgcttccgtcctgcggcaaaaggcgctccgccggctccggacgggcttggtttgcacgcggttttcattatctttgccgaagataaactcccgcacggacaggcagcgtccccggcagcggcaaaacgatttgccccagcccccgacttgcactatctttgccgtggataaaccgccgcacggacagacgcccggcaaaccggttccgcacccggcccgcatcgtcttcgtgcgttaattaaaataaggtatgtttctctggtttatttcgattctgacgctcgcggccgcagccgcagacatcatacactaccgccggctgcggcggcgcggaacctccgcacgcaacctgcgcctgttcgtcgcgctggccgccgccaccgacgccctgccgccggtcatcgccctgaccgacgccctgagccgcgacaacaccacgggattcatgctcttcgccatgtgggcgttctgggtatggatgatcaccgtcctgccgcgcatcgcctgctatttcttccggctcatcggcctgccgcacgccggcatcgccgccggcatctgcgtggccgcgctcctgatctggggcaccactcggggcaggacgcaaatccgcgtcagccgcaccgaagtctgctccgaacggattcccgcgggattcgacggtttccgcatcgtccagttctcggacgtccacctcggcacgctcgtctgccccgaagcggagctgagccgcatcgcggacagcatcaacagcctgcatcccgacctcgtcgtcttctgcggcgatctggtcaatatccgcggttcggagttggacgcccgcgccatgcgcctgctgggcggcctgcgcgcaccgtacggagtcgtgtcggtcacgggcaaccacgacgccggagtgtacatcaaggacagcatcgcgcatcccgcccaagcgagtctggccgaggtcgtcgcacgccagcgggaaatggggtggcgcgtgctggaggacacgaccgtctacctgcggcgcggcggcgacagcatctcgctgacgggcctttcgttcgaccccgcactgcggcacctgcgccacgctcccgacctgccgcccgcgaacctgaacgccgcctaccgcggcgtccccgactcgctctacaacatcaccgccgtgcacattccccagctctgggaccaaatcgccggagagggatacggagacctgaccctttcgggccacgtacacagtatgcagctgaaaatacgccttttcggacacgccttctctccggcgcagctgatctacacgcggtggagcggtcgctacgacgaaaaaggccgcacactctatatcaacgacggcacggggtacgtcgcattcccgatgcgtctgggcgcatggcccgaaatcacactcataacgctgaaaagatgcgggtaacactttccgccgcggttacggccgacggctttctggacgacaacagcccccggaggctgattatttcgacgcccgaagactgggcggaggtctaccgtctgcgcgccgcgcacgacgccattctggtcggcgccgaaacactgcggcgcgacgacccgtcgctgctcgtgcgcgacgaagaggttcgcgcccgccgcagggagcggggattgccgcctgacatcgccaaagtgacgctaaccggcacgggcgaactttcgcccggactgcgtttcttcaccgaaggcgaggccgaacgctatgtgttttctccgcacgaaatagatagtttacagaacattgaaacggttatatcaaccggagaaccaattacggcgaagctgatcgtcacccagctggagaagcggggcgtcgaacggctgatggtcgagggcggggcggcggtcctccgcatgttcctcggcgaaggcatggccgacaccctgcggctggccgtcaacccgcaactgcggctcggctcggcgggcggcgcggaattccgcttcacaccgccgcagggcactccgcagacccgtgaaaacttgggcggcatggaggtcacgacctacacgctgcatcccgacacctccgccgcagacctgcgtttcctgaagcaggccgtggacgaaggccgcaaatgcactcccagcgccacgtcctactgcgtcggcgcggtcgtggtcacggccgacggccggatctttgcagggcacacgcacgaaacctcgccgacgcaccacgccgagcaggaagccatcgccaaggcgctggcggccggagcggcgctccgcggagccgccatgtactcctcgatggaaccctgctcgcagcgggccagcgaaccggagagctgcacgcagctcctgctgaaatacggattcgcccgcgccgtcttcgcgctctacgaacccggctgcttcgtctgctgccgcggtgcgctcaccctgcgcgaagcgggcgtcgacgtacgggtctatcccggactggccgggggagtgtgggaagccaacgcccacctgaagcgctgaaaccggcgcaatttatgtccataagggcctaaaattggcctcttttgccggaaaatcgcgcaacatatcgggataacttatatatttgtgttttaaacgtattgatgaatatgaaaacagcagtcggaatagcttttgcggcggcattcgcaaccgtcgccccgctgtcggcgcaggaggtcaagcagacgctttcgctcgacgaggcgatcgccgtcaccctcacggaaaatcccgcgatgaaggcagccgagttcgaggagaaggccgcgatgcaggagcgtcgcgcggccatcggcctgcgcatgcccaaaatcaacgtcacgggcgcctatgcctatctgggcaaggacatcggattcgacttcaacgagatgaagggtcccgccaagaacctcgcgggacagctgctgggaagcgggctgataccgcccgaagcgatcccttcgatcaacggcctgctcaacccgctgctgaacgccgactggttcctcacgctgcaggaccggagtctggggttcgtgggtggcggggtgaccatgccgatctggctgggcggtaagatcaacgccgccaaccgcgccgcacgcatcaacgaacgcaccgccgcagagcagggcaaccagacgcgcaacgccctgatctccgagctggtggagcgttacttcggccttgcgctcgccatgcaggtcgtcgaggtgcgccggcaggtcgtggacggcgtgcgccgccacctcgaagacgccatagccctcgaaaagaacggcatgatcgcccagagcgaacggctctacgtcgaattcaagatggccgaggccgagcgcgagctggccaacgccaagctgcaggccgaaaccatcgccagcgcactctccaacacgctgggacgcgaaaacgcatggcagcccgtgacgtcgatgttcatgatcgacaaggtcgaggagctggcttactatcaggatctggcgcaggaccgcaacccgctgctcaatcaggtttcgctcaaacgccagctggccgaggagggcgtccgcgtccagcgcgccgaattcctgccgcaggtggcggccatcggcggcggttcgttctacaactatcaggtttcgggcatcgtgccccgctgggccgtgggcgtgggggtcaatatcaagatcttcgacggcctgaaccgcgaatacaaatattcggcggccaaacagaccgcccgccgcgtcggcgccctgcagaacaaggccggcaaggatatttcggtgctggtcgagaagctctacaaccagatgatgaactaccgcaaccagatgacctcgatcgacgcgtcgctgaacttcgccgaggagtacctccgcatgaaaaacgccgccttcctcgaaggcatgagctcgtcgtcggacctgatcgacgccgagctgaacctcgcgggagtgcgcaccgaacgtctgcaggcggcctataatttcgacctgctgctggcgcagctgctcgaaaccgcaggtatcagcgacgaattcccggcctatgcgcgccgcagcgacgcacggcccgttctgttcgataaaaaataaaatccgaaaaatatgaaacgcagcaacatcattggaatcatcgcggccgccgtggtcatcatcgtgtcggtcgtactgatcagctggtacctccgcagatcgaccccgacgctgattcagggcacggtggagtgcacgacctacaaggcctcgtcgaaagtgccgggccgtatcgacgacatgaaagtcgagcagggcgaccgcgtggagaaggggcagctgctctacacgctctcgacgcccgaactggaagccaagctccagcaggccgaagcggtcaagagcgcggccgcggcgttggatcaggccgccatagccggcgcccgcatccagcagatcgaagcggccatgaacatgtgggagaaggcgcaggccgggctggaactggcgcgcaagacctacgagcgcgtgaaaaacctctacgagcagggcgtagtccccgaacaaaagatggacgaagcgtcggccaactacaaagccatggaagccacggcgatggctgccaaagcgcagtacaatctggccatggacggcgcccgcaaggaggacaaggaggccgccgcggcccgtgtccgtcaggccgaaggagccgtcagcgaagtcgaatcctacatcagcgacgccatggtctattcgcccgtgacgggcgaggtctcgaccatcatcgccgagcagggcgagctggtcggcagcggctatcccgtggtggcgatcctcgacatgagcgacatgtgggtgactttcaatatcaaggagaccctgctccccgcgattcgggtcggcacccgcatgagcggctacgtgccggcgctggggtatgacgtggagttcgaggtgacctatatcgccgtgcaggccgacttcgcgacgtggtcggcgacccgcacgcagggcggcttcgacatccgcaccttcgccgtcaaagccaagcccacgacgcatatcgaaaacatgcgtccgggaatgagcgtactcgtggactgggacctgatcgggaagtaggagagtgcgatgctgaatttcctgcgtaatacttatgccgttctgcggcgggaactgacgcgcctcgcgcaccagccgatgtatttcgtgctgatgctcgtgctgcccgtcgtgtcgttcgcgttcttcgccctgctgttcaacaagggcgtggcgcgcgacattccgatcgcggtactggatcaggaccacacctcgctctcgcgcaaggtcacgcagatgatcgacgacacggcgacggcaatggtgtcgtacggcattcaggacatggacgaaggcgaaaggctgatgcgcgaaggcaagatcatggcgatcgtgcagattccggcattcttcgagaaaaatatcctgagcaacagccagacccatatcgagacctacatatcgggaacgaacatcacggtgaacggcctgctgtcgaaagacatccagaccgccgtgacgaccttttcgggcggcatccagatccagctgctcaccaaacagggactcaccgagctgcaggccatggcgcagctgatgcccgtgcggttcaacaagcacgtattgttcaatccctatatcaattacggctattacctctcgccgagctttatgccgatgatgctcctgatcttcatcgtcatggtgacggtcttcaccatcggcacggagcttaagaagggtacggcgcgcgaatggatcgagacgggcaacggctcggtatcggccgcactgctggggaaggtcctgccagtgacggtggtgatgttcctcatgtcgctggtcatgttcctgatcatcttcaaggtcgtcggcgtgcccctgaacggcagtctgacggtcatcctgctgagcacgctgctcttcgtgatgagctatcaggccatcgcggtcttcatcgtctcgctgctgtcgaacctgcgcctttcgctctcgatcggcggcggctattcggtgctggccttcaccttttcgggactcacgttcccgatcatggccatgtggcccgccatgcagtacctgagcaggctcttcccgttcacctactacaccgacatcttcgtcgatcagatgctgcggggcgccccggtcgtctgttcgctgcccgacatgtgctacatgtcgctgttcattgtcttaccgcttctgtgcctgccgcgcctgcggaccatctgcacggaggaaaaatactgggggaggttatagcatgagccgtttcacacatcagatgacctcttattggcagcagatgctgtcggtcatgcgcaacgagttccgcacgatcttcaccgatgcgggcgtggtcctgatcctcgttctcgcgctgatcatctacgccaccgtctactcgatggcttacggggcgcaggtgctccgcaacgtgccgatcggcgtggtggacgaatgccgcacgccgaccagccgcagcctgatcgagaccttcaacgccgggccgaacacctatgtggcctacaacccgacgagcatggaggaggccaaggatctcttcttcaaacgcaagatctacggcgtggtctacattccgtcggattacgaggagaaactgctcggcggcctgcaggccaacgtcgcgatctacgccgacgccagctacttcctcatgtaccggcaggtgtttcaggaggtcgtgacttcgatcggcgccacgggcgcgatggtcgaattccagcgtctgatcgccaagggagccaacctcccgcaggcgcaggccacgacccagccggtcatctaccagtcccacaacctgttcaacccctatctgggctacggcacattcgtcatgcccgcgatcatcatggtcatcatccagcagacgatgctcatcggcatcggcatgatcggcggcacatggcgcgaattcgggctgtaccgcaaactctgtccgcccgaccgcaagcggatgtccacgctcccgatcgtgctgggcaaagcgctggtctacggcatgatctattccgtgacgacgttctacatcctcggtctgcattacaggctgttccactatccgatgaacggcgcgacgggcacaatcgtggtcttcatgctggcgtacatggcggcctgcatcgcgctgggaatcgccatttcgacgctcttccgctaccgcgagaattcgctgctgctgttgttgtggacctcgattccgctgctgatgctcagcggtgtctcctatccccgcgaaggcattcccgactggctgttcaacttggggcagatattccccagcagccacggcgtaaacgcctttatccgcatccagagcatgggagcgtcgctctccgaagtgctgtccgaaatcaggatgctctgcattctggccctcgtatacggcggtctggcctgcatcggcatccacttggtgctcaaccgcgcggacaaggacgacatcccggcgccgcacacctccgaaccggaaaagtgacggcgacgcccaagcatccgcaggaaccgccccgtcccgtccgcaaaaagggacggccatcggcccggcacaccggcacaaggacgaagcggaagcaggcttccggcataatcacaaaaaagacgtcaggcattgcacctgacgtcttttttgtccgaaccgcactggttaccgcggaccgtggaagatacccggaggcggcccgcccggaccgccgggtcccatgcggcggggtcccgactgcacggccccgtcgtaatcggagatgttcttcgaacccttcttgccgaagcggcgcaggttgtaggtgaactgcaccatgtaataacggccgatcacgctgttggtcgcattctgcgtccatcccgaacccgtcgtgcgggcgaaagccttgttgcggttgagcaggtcgttcacgccgaacatgatctcgccgcgcttgttcttgaatatcttcttgccgatccatgcgttgcagagcaggtacgaatcgtcgtaatcgttcgtgaaaccgatatactgcgtgtaagccacgctgcccgtaaaggtgaagcccagcgggaagacgaacttcatgttgccctgcgcccggtggttgaagtagcggtttttggaacctgactcgcccagcgagttggtcgcctcgttgtaggtgccgttccacgagagcgtgaagtccacgttttcggaaatattgctgcccagcaccgtgttgaagtcgtagccgatattgctcgtgtcgttgcgcttgccgcccgtgatgaatccgtcggcgtccacctctccgcccagcatgctcggcgtaagcgagtagctgacgcccgccatcacgttgaagttgctcttcaggaagccgatcggaaaaccgtagctcaggtgcgtccgcaggctccagtagccgtcgagattgacgggcgtggagtagtagttgggcttgtactgcacgccgcccaacgtgatcgtgccgggattcgacaccacgtgcgtcgcattgtagtcggaggtgttctgcatcgagaacatccacatgaaggtccggcccttctcgacgttggaattgatgtagtggaaattgacgcggtggctgtaggtcggattcagatcgggattacccttggtgatattctgggcgtccgatacgtcggccacgttctgcaggtcggtgatcgacgggttgtcggtataggacgatacgtagagccgcagcgaattctcgcggttgatgttcaactgtcccatcatgaaataggtcacgttgttgtacgaatgcctgatcttgtcggcgtcgtcccgcacgatctgcccgtcgagcgacgaacgctgataaaagacattggcgatgaacgtattgcgctccttcgaatagcggaagccgggacctgcgctctgcgtcaggtagttgctccggtaggagttcgaaagcgctccgtcgggcgccagtcccgcgatcgaataatccgcgccggtgatatacgacttcttgtcgcgctcctgataatcgtacgaaatgcggtactgaaggcttacctgcgcatatttggcgacgggttccgtgtaggagaactgtccgcgcaggcggtagctgctcgacggcgcgaggtcgcgcaggtagcgcaggcgcgtgtagcccgtcgtgtcccatccccacggcgcgtcgacgccgtcgggccggaggtccgagagcggcagcacgttcgagaaggagttcgagttgttggtgttgtccgagtagttcacgtcgccgtccacggtgatcgtacggccgtccttgcccagtttggtgcggtaaacggcgttcgtccgcacgttgtaaccgtggcgcagggcgtcgctgcggttctcggtgcggctgtaaccgctttcgccgaactgccagccctgcgtcgtgctcagcgggtcgttcgactggtagctgaagctcggacggaccatcagattctggttgtcggagattttccactccagacgggcgttgaagcggtggttatacgactcggtatccgagtagccgcgcgtcgagagcgtatccacgggcatcggcgactcgtaccatttgtcgatcgtcgaacggtttctcgtgtcggtattgttgaagaaatagctgccctgaaacgacacctgatcgcgcttgccccacgtatcggagtagtttacgccgatggcgttcaccgacgccacgccgctttgggggcgcaccatatactggcccacgccgccgcggcgtccgcgccccgaaccgcccgaaacgcccagaatatcctcgaacgagaagttctgctggttgatgttgttgaacaggccgatgaccgacacgcggctgctgccgctgaagatattggcgttgccgcccacgacgtatttgttcttggcttcggtcttggtgtcggcgtcgtaaccgtaaccggcatagagcttgccgaactgcccctgacgcatgttggcgtgcgtaacgatgttgagggccttgtagccctcgccgtcgtccatgcccgaaaattcggccgcgtcgctcagcttgttatagacctccacacggtccacggcctgcgccggaagcgacttgatggccgtcgtcacgtcctcgccgaagaactccttgccgtcgacgaaaaccttcttgatctgctcgccctgcgcctcgaccgtaccgtccgacacggtgatgccgggcatcttcttcagcaacccctcgacgtcggcgtcgttggtgaccttgaaggctccggcgttgtaacttaccgtatcgcccttctgcgaggtgcgcagcgccttggcctccttgacgaccgtttcgatctgcacgccgggcttgagttcgatcctgccgatgttctgtttgccggccgccacccggaaggtggtttcgtaattgttgtaaccgaggaaggagacggtgagtctgtattcgccgtagggcagcgagggaatcgccacggcgcctttatagccggaagtgaaatactgtttctgatccggagtcttgaccggagcgacctccagtacggctccggcaacgctttcgccggtatcggcgtcaagcaccgttccgctgaccgcacccttttgggcgaatgcggccacggcgaaaaacaggaatagggttgagagtagtagccgtttcatcttaatgttctgtgtactttctgattttgcgcatgcgaaaataacttttttcccgcatacggccctccgacaaggggtgaatcgacaaaaaaagggcgtcagccgacaaccgacgccccgactgcaacaaaccggtcgattttcctaacctcactttttctcctttccggagcgcggtccgtcgcatttcctatcccccgcgcagggggcgcacttgcggccttcacgcacggcggccttgtcgccccggccgtccttcatccggggaccgcggttcatgccgtgacgcggcccctgcatctgcttccactgctcgaactgttcgggcgtgaggatgcctttcatcttctcggcctgcgccttgcggtatgcgcgcatctgctcggcctgcgcctgcatctcctttatatcctgcaggttgacctcatagagctgcttcgactgcttttcgctgaggttcagcttctcggtcatgcgttcggtcctgcgctgggccatctgctcggccgtcggccgctccttcatcatcggagccttcttcgaatcctgcgcaaaagcgcccgttccggccagcaggcacaaagccgcggcgactgcaaaaattctctttttcataatctcaaatatcaatggttaattcaatccgtcaatcggacccgtttcggtccccttacgatgcaaaggtaaggccaaaccggaaaaacggaacggcaatgcgggtcaaacgcccgaagctcagggtcaaacgcctattcggcgggttgaacggacgtgagccacgccttgaattcggggacgcgggccttagaaatgacgatgcgctcaggagtttcgagcacgagactcaacgaaagacggctgccgaaccacacggcgatctccttcacggcgcggcgcgccacgatgaactggcggttggcgcggaagaaatcggcttcgggcaggacggcctgcagcgcttcgagcgtcttgtcgagcggataggacgccccggcgaaggtataggccgtcaccttctcgttgcaggtatagcagaatgcgatatcctcgcgtttgagcggaatgatcttgtcgcggacatgcaccagaaaggtctgctcgcggcgcgccgcggccagcgtgcgcacgcgcgaaccgtaatcgctgcgctcgcccttggacagccgcatgagcttgccgagcgcccgctgcacgtcggccgcattgagcggcttgagcaggtagtcgatgctgttcaccttgaaggcctccagcgcatagcggtcgtaggccgtcgtgaagatcaccggcgccgtgacctccacggcgtcgaatatgcggaacgaatcgccgtcggccagatggatgtccatgaacagcaggtcgggctgggggttggcgcgcagccaatcgacgctctcctcgacgctttcgagcgtatcgacgacacggatgtcgggagccgcctgtttcagaatggctttcaggttcagtgcggcggcggtttcgtcctctatgatcagtgctttcatcctgcaaggggggtatgcagcggcatccgcacgacgaactccttgtcggtgtcgatgatttcgatgtcgcggccggttatcaggtgccagcggttgcgcaggttctccagtccgatgccggtcgaaggttcgggttcgagcttcggcaccttgggattggagaccaccagccagccgttctcggtgcggatcgaaatatggaacggcttgctgcgggttatggtattgtgcttgacggcattgccgatcagcggctgcagcgagagcgccggaagcgtccacgtgcggtacttctcctcgatgtcgatgtcgaagaagagcttgtcggcatagcgtatcttgaagaggtagctgtacgcctcgacgaatttcagctcctcgtcgagcgtcatcagcgtactctgtccgttctggatgatgtagcggaacgtataggagagctggtcgatgtaggtcagcgccttctcgtcgtgcttctcgcgcacgagcatcgccagcgaattgagcgaattgaagaagaagtgggggttgatctgtcccacgagcatgttgtagcgggtcgtgaggttctcgttcttgagccgctcgttctccatgacgacggcctgctgcttcgaattgagcacgtagacccagccgtagagcatcgacaccgccacggcgaacgaacacttcagcagcagcatgtagtcgaaaatatggtcgcccatgcagttcagcatgatgcgtcccgaacgccactccgtgaccggcgcgaccatatacagcgcggcggcggccagcacgcaccatatgcagtggcgcacgaagcggcccggcgtgtacctgcggcggacggaggtgaggattgaaagcatgatgaacgaaacgaccagataatagaagagctgcagcgcgagttccgtcgttttcgaaggccggttgaaaagcgtgctgtaatcgaactcctcgccgttgcgcatgcgcagttcggtcatcaccggatgcgccccgtgacggcgcggcgcggccagattcgccaccagacggtcgccgtccttcaggttcatccggtagatgcgctgcatcatcacatagacgctgtcgccgttctcgtagacgatgtagccgtggccgtcgggacttacccgcagcgttccttcctcgccgcgcgcaatgacgctcgccttggccggacgcggctgtccgtcgctcttctgatcgacgatcagcagcagcacgtaggagaaattgacgaccagactgacggccagcgccaccagcagattgagaatcaggtcggaatatttcggttgcagccccatccgccgtttactcctcctctttgaaccacgacgcatagagcatgtagtcgcgggccgtgcggcggatgatctcctcgcgctgctggggcgtcacctccttgaccttcttggccggcacgcccgcatacaccgaattgggttccagctgggcgttggagagcaccaatgcgttggccgcgatgatgcagcccgacggaaccacggcgttgtccagcagggtagcgcccatgccgatcaggcagttgtcgccgatgcgcgcaccgtgaatgacagcgttgtggcccaccgacacgtcgctgccgataatggtctgcgacggatgcggcgaaccgtcgtaaagcgtgtgcaggaccacgccgtcctgaatattcgtgcggtcgccgatgacgattttgttcacgtcgccgcgcaatacggcgttgtaccagatcgaacagtcgcggccgatggtcacgtcgcccagaatgacggccgtctcggccagaaacgtattttcaccgattgcgggcgtatgtccccgcacctttttaatcaaagccataagtttatatgctattaaatgtcacttcgcttttgtatcgtctccgcgtgtccgagggcggacattcacggcaaagccgtgttttcaggtctgaccctcccctaaatcccctcctcggaggggacttggcattagtgcggacacatgctgttaaatgtctcttcgtgtttggcctcctgccagtactcctccatcttttcgagcggaagctcgtggagcgtatgtccttcggcggcagccttttcctccatgcaattgaagcggcggatgaacttcttgttcgtacgttccagcgccgattcggggtcgatgccgtagagccgcgacgcattgaccagcgcgaagaacaggtcgccgaattcgccttcgagcttctcccggcagccgggggcttccgaacgcatctcggcttcgacctccgcgatctcctccttcaccttgtcccacacatcctcgcgccgctgccagtcgaaacccgtcgcggcggctttctcgcccacgcggaaagccttgaccatggcaggaagcgagcggggtacgccgcccagcgtgccgctcttgcggtttttcttgcggagtttcagggcttcccagttctccttgaccgcgtcgggcgtattggcgtgaatatcgccgtagacatgcggatgacggtatatcagcttgtcgcacagggcatcggcgacctcgccgaaatcgaaggctcccgcctcctcgcccagcttggagtagaacaccacatgcagcagcaggtcgcccagctcctccttgatgccctccatattgtggtcggtgatggcgtcggccagctcgtacgtctcctcgatggtattgctccgcagcgaatcgaaagtctgctcgcggtcccacggacactcgcggcgcagcgtattcatcacttcgagcaaacgggccgtagcctccagtcgtttatcttccatgctcagttacagtttacggcaatggctgttcgggaagcggagtcggccgatctgcctgagcgcgcccgtccatgccggaatttattttcagcaaaggtagcaattcggcggaaaaaaagtaactttgtccgaaacaaaattccgtaccgccatgaaactgcgatacctgctgcccctcgcgggtgtgctctgcaccttcctcacggcacatgcccagccgtcgccggcccgtcaggctttctacgagggcgcctgccgcatcagcccccggacgatgctctgttacgaaacgccgctggcgccgctggccgcctacctgcgcgaatatatcaacgtcgaaacggccagcgacagtatgtcggccgacgacgcgatcgtgctttcgaccgatccgacgctgggcggcgaagccttccgcctgacggtgctcccgcagcggatcgaaatcgcgggcggttcgtacggcggcgtattcaacggcgtgcaggccctgttcaggctgctgcccgccgaaatatacgccaagaactgtccgcttccggtcgaaatcgcctgcacgaaggtcgaggacgcgccgcgcttcccgtaccgcggtatgatgctggacgtggcccgcacgtggatcgacgcagctggagtgaagcgttacatagacttgctttcctatcatggaatcaacaaattgcatcttcatctttcagacgacgaagggtggcgtatcgaaatcagatcgcatcccgaactgaccgaaatcggcggcttccgcggcggcgattcgcccgtgcgtccggtttacggcaagtgggacgagaagtacggcgggtattatacgcaggacgagatgcgcggcctgatccgctatgcggcggcgcgcaacatcgagatcatccccgaaatcgacctgccggggcacagccgcaacatcgcgtcggtgcatcccgaaatacgctgcaactatccgcccgacacggtttcgaccaacggttacgactaccgttcggcgtggtgcgtggcccgcgaagagaactacgcgttgctggccgacattctcggcgagttatgcgcgctgtttccctcggagtacatacacgtcggcggcgacgaggtggacatgacccagtggaaccgctgccccgactgtcaggcgctgatgagccggcggggcatgaccgatccgcaccgattggaagacctcttcatggagcgcatggcggcgattctcgcggccaacggcaagcgtcccggcgtgtggaacgaagccgtgaccacgggcggcctctcgcgcgaatgtctcgtatacggctggcagagcgtcaaggcgtgtctcgacgccacggcgaaaggctacaagaccgtggtgatgccgggcgaatacttctatttcgacatgcggcagacgccgcaggaggaggggcacgactgggcggcggtcttcgacgccaaaaaggtcttcggattcgactttacggaaaagggcttcagcgatgaacagatgcgcaacgtcgtcggcctgcaggggacgttcttcagcgaagcctacgtttcgcacgagcccgaaaagcccgactatctggactacatgtgttttccgcgcatctgcgcgctcgcccgcatagcttggcgcggcaactgcgaaggctgggacgcctattacagggagctgaccgaccattacgaccgcatggcggccatgggcatccgcttccggcttttcccgcccaaggtaagctacaaggagggcgccttcaccgtcgtggcggacgacggctcgaaaatcttctacctcgaaggcgattcgcccgaagagcatcggtacaccggccccgtcaaaaccgaaaaaccgcatctctaccgcttcctgacgcgctacaagacgggacgcagtccctacgtggccgacaaatcctactacaggacccttgcgcccgccgtgacgatcaccacctcgatgggcgaaagcacgcagttcccctacacgaacgcctcggcctacaagggacttgcgcgcacgcgccgcgcctgccgtcagcaggactggatactctacacctatgaacagccggtgaagtgccgcgaaatgtttttgcagacgggaaaccgccagctgcccaaaaccattataaccaccggttatgcagaggtgtcgtacgacggcacgacatacgagcatgcgggcgatctgaaaaagggcagtataactttaaagcccggccggccggtgaaagccgtccgcatcgtctcgacctgcgacgacaacggcacgccctacgtcacgatccagccgccgcagataaagccggtactgtaaagagacgacgcaatcaccggaaaaccgacaagagcagtatataactgtaaatcaatgttatttttccaatccgattaaaaggatcggaacggttagcacactatagaaattctccaaataccactttacccgttcaaaggagactatcgaacagtgatctttggaaacatatttcaaaaagtcctttgtcccacagacatagattcctacattaatcatattcttgatttcggcccccgcttgcaacctcagcaaatcaccaccgataaacgatctgtgattgaatgccacatcgacacctatgttatttttccagaaatcaattaccaaatcgttatccgaatcgttgaatactttcttctccccttcccaacctttttctaagaagagatctttaagaagagcgtttatcgcaggttgtcttcccttttgaattttcttgccgatattctctttctcccgattgatttcatcaaatttcaactctatattgctaaaattcagctgatccaatataccgtcgatttcattcttgatcgtatattccgagtttaaaataatatcagcatatctatgtgcatattttttacatttcatgtctataagattatacgcaaatatataaaatagatcgacagaatgacatgctcagtttattttatttcgacaaaagcagccccaagcaagacagtctgttccaaacagtcgcagtcgatcggttaaaatcgtggatctcgcacccgaaaaacggcctgcatttcaacggccgtatcaatgcggggagtcggaaagagtcgccgctctgacggcaaagaggtagaagagatattgcgcggcataataggtaatcatcacgacacaggtccggcagggaacgggcgcgacgaagcgtccccatgcgatcacggagtcggaaaagacgaacaacagggccgcaaggcggaaccatgcggcatacgctccgcggtactgaagcgcgctgtacagcatgcccgcgatgacgagtccgtagacggcgacgcccgcgcgttcggccggatcggcggcgcggggaacgatgcagacgaacagaaacagcagcagggccgtcagcaccggccagacaaaaggccggggcgcaagttgcgcctgcggcaagaagtagcacatgtaggctccgtgcgccaaagcgaaaaacagcatctgcggaatgaacatccctccggcgcccgccgcatcgccgacggccgacaacaagagcgccgcgccgaccggaatcagcggtttcagccggagataaaagagcgacagcgacagcagcaggaccggataagcgaccttgtagggaatcaccgccgccttggtaaagaacagcgcggcgccggctgcgaaaagcagcgtggtcaggcagagcgttcgggaggttcgttgcatggtttcggtaaaaaagccgcctgtacttacgaacaggcggcttcgattatggtcaataagctcgtcggcatgaccgtggcgggcgtgtacccgcaccgagatgcgacgagcggcattcggattgggatcaaccgcggacctgagctccgcaccgctgttcgaactgcgcggtgaggttcctcatcgccttttcgatcgtcttctcgtcgagcgtgcgggtcttgtcttcgaggatgaagctcagggcgtaggatttcttgccttcgggaagtttgtcgccctcgtagacgtcgaacagcgaaacgctcttgagcagtttgcgctcagtggcgaacgccacgtcgcgcagcgccgagaaggtcacctgcttgtcgatcagaagggccaagtcgcgtttcacttcggggaacttcgaaagctcctcggccgcaatcttatgcttgcgggtcgatttcacgagcgcgtcgaaattcatctccagatagtaaacatcctgcttgacatcgagtcgacggcggattttagcacttaccgtgccgatctgcagcagctccttgccgccaagcgacatcgagagcgcctcgccgaagaggtcgttttgcagcgtctcggtccggagcgcatagatgtcgatgccgaagcggcgcagaagtttctcggccacggcgcgcagcgtgaagaacgacgcagcctgcggccgggcgttccacgacgcaggctcggccacgcccgtcacggcgatcgccagacggtactcctcggagtaggccgcgaggcggttctcctccgagcgtttcgactcgtcgtagaaatagcagttgccgaactcgtagagtttcaggtcgccgttcttgcggttggcgttgagctgcacggcttcaagcatgttgaacagcagcgtctgacgcatcacgttcaggtcggcgctcagcggattgaggatgcgcacgcagttttcggccttgtaggactccagcccctcgtagtaggccgccttggtcagcgagttggacatgatctcggtgaagccgttggaggtcaggaaatcggccgcgagattcatcagcttgctgcggtcgggcttcggcgcataggagagcgtcgagcggacgcgcgagggaatctcgacattgttgtagccatagatgcggagaatatcctcgacgaggtcggcttcgcgctgcacgtccacacgatagggcggcacggcgacgctcagcacgccctctttctcggcgagaatcttcacttccagcgcggcgaggatcgtgcggaccgtatcttcgggaatcttcttgccgatcagcgagtcgatgcgggcgaaggagatgtcgaatttgaagtcttcgacaggattgggatagatgtcggtaatgtcgctcgaaatctcgcccccggccagctccttcatcagcagggcggcgcgcttggcggcatagacctgcatgttgggatcgacgccgcgctcgaaacggaacgacgaatcggtgttcaggccgaaacgcttggcagtcttgcgcacccacacggggttgaaataggcgctctcgataaatacgtcggtcgtcgtgtcgccgatgcccgaatccagtccgccgaagactccggcgatgcacatcggacgctcggccgagcagatcatcagatcgtcggccgtcagttttcgctccacgccgtccaatgtcacgaaaggcgtgccttcggtgcaggtgcggaccacgacttcgcggccttcgatcttcgccgcgtcgaacgcgtgcaggggctgccccagctcgaagagcacgaagttggtgatatcgaccagattgttcttggggttgatgcccgcggcgcgcaggcagttctgcatccactcaggcgaagggcctattttgcagttcttcaccgtcacgcccgcgtagcggggggccgcttcgtggttctcgacgcggacggtcaccggcaggtcatggttgtcgggagcgaaggccgagacgtcgggcatcttcacttcggcgttcaggccctgactcctgaggtaagccgccaaatcgcgcgccacgccgatatgcgacgcggcatcgacgcggttgggggtgagtcccacctcaatcaggtagtcgtcctcgatgccgaggtattctttggccgtcataccgacgcgggcgtcggccggaagttccataatgccgtcgtgcgaggccccgatgcccagttcgtcctcggcgcaaagcatgccgagcgactccacgccgcggattttgctgcgtttgatcttgaattcctcgtcaccgccgccggggtagagcaccgtgccgaccgtggcgcagagcaccttcagcccggcccggcagttgggcgcgccgcagacgatctgcaggggatcaccggcgccgacatcgaccgtcgtgaggtgcaggtggtccgaatctggatggtccgtgcaggtcagcacctcgccgaccacgacgccgtgaagcccgccctttacggtctcgatcttctcgaaaccctcgacttcgagtccgatgtcggtcagtatccgtgcgatttcttcggccggaagatcggtgtcgagatagcgtttaagccagttatacgaaatattcataattaaaagctttaatgttcctcttgcagttcaacatgccggaccgccttccccgcggcggaaggccgcgtttgcaggtccggccgccccggaatccccgccttggcgggaagtgccgccgtcacagcgtccggaacggcatgctaaaatcgaacaaagatacataaaaattgttaatctcgtcgagattggcgcactaaatcgcgccggcgcttcggaccggcatttcggcaggcgggcacggaaaagggagcgacgccatatatgtaggtatcgaaaatatccgccgaaaaatttggatttaaggatcggacccgttatatttgccgaaaagaatatgattcgcaatttcaacatacaggcttggtggtggcgctcgttgactctcgtggacaatgagtgcggctccgtgcgtgtatagttgaaacctgataccagccacaagcccgttgtttacgagagagtaaacagcgggctttttcttttgcactttcacgaaacaaacggaaaaataaaaaagactatgaaaacgaaaaaattctgcctgaccgagaatcagatgcccgcgcaatggtacaacatcgtggccgacatgcccaacaaaccgctgcccccgctgcatcccgcgaccaagcagcccgtaaccaaagagcagatgagcgccattttcgccgaagagctgatcgatcaggagatgtccgcggagcggttcatcgacattcccgaagaggtgcaggagatttacaaaatatggagacccacgccgctcgtgcgggctacggggctggagaaggcgctcggcacgcccgcgaaaatctatttcaagaacgagagcgtctcgccggccggatcgcacaagcccaacaccgccgtgccgcaggcctactacaactacaagcagggcatccgccgcctgaccaccgagacgggcgcggggcagtggggcgcggcgatcgcattcgcggccaagcacttcggcatagacctgcaggtttacatggtcaaggtcagctacgaccagaaaccctaccggcggctgatgatgaacacttggggcgccgagtgcatcgcatcgcccagcacgctcacggcatcgggccgtgcggcgcttgaacgcgacccgaactgttcgggaagcctcggactggccatttcggaggcgatcgaagtggcgctgcaacaccccgaagatacgcggtactgtctgggaagcgtgctgaaccacgtcatcctgcatcagaccgtgatcggacaggaagccgtggcgcagatggagatggccgacgccgagccggacgtggtgatcggatgcttcggcggcggcagcaacttcgcgggactgggattcccgttcctgcgcaagaacctcacggaaggcaaaaaaatccggatcgtggcggtcgagccgtcgagctgcccgaaactcacgcgcggcagtttccagtacgacttcggcgacgtggcgggattcacgcccctgctgccgatgtatacgctggggcacgatttccagccgtcggacatccacgcgggcggactgcgttaccacggcgcggggtcgatcgtcagccagctgctcaaagacggactcgtcgaagcgcagtcgctgccgcagaccgagaccctcgccgcaggcattctcttcgccaagaccgagggcatcatcccggcgccggaatcgacgcacgccatcgccgcggccatccgcgaagccatgcaggccaaagaggaggggacgcccaagacgattctgttcaacctctcaggcaacggcgtgatcgacctctacgcctacgaacagtatctggcgggagcgctgaaagactatgcgccgggggatgcggaaatcgcaaagacggtcagccggctggagcagctgatatgaccggagccgacgataccgcaaataaaaaagacagcccgcaatgggctgtctttttattttgacaccggcggtttcggaaccggcttccggtctgcgcccaaacggaagggtgtgcatgcaaatcccgcgcttcgacacggccgtcattacctcgaccccagccagaggaagaacatgccgacgaggataaaggccagatcgaaggctttggagcggaggttgtgctcgcggaacagcactgccccgcacaggaaagagacgacgaccgaactgcggcggaccatcgacacgacggagaccatggcgtcgggctggtgcaaggcgtagaaataggcgaaatcggccagcacgaggaagaacgagatcagcggaatggcccaagtccagtggaacggggtggtcgtacggcgacgcggccaccagaggatgccgacgacgaccgacatcaggccgaacagatagaggttgcaccagccctgcacgaagaccgggtcgagacgcgccatgatatatttgtcgtacagtccgcttacgacggcggccagagccgccaccgcgatacagagtatccagacgttgtgacggaaatcgaccccttcgcggcggctcgaacggctcagcaggaagagcgagaggagggtcagcacgacgccggtccactggcaggcgttgagccgctcgccgaagatgagcatggcgccgacaagcaccatgacggggcgcgtggcattgatcggaccgacgatggtaatcggcaggtgcttcatggcgaaatagccgaaaatccacgaagtgaggacgatgaccgctttaagcagcaccagtccgtgcgcccggagcgtgcccgaagaggcggccagtatcgtgccgtcgaaccatccgaagccgcactcggccgagacgatcatcggcagcaggaaaagcgccgagaagagggtgttgagcaacagcaccggaagcaccgcattccccgtgagggattgcttcttggccgcatcgtaaaagcccagcagcgcggcggaggtgaaggcgagggtcagccacataatgcgaattcggcggattgacgtccggttcggttcgggagcgttcggcggttcgggttacagacggcccgtctaccggatttcgtcgctgtaaaccgcgcccggaaggtcgtggaggttgtagcgcgacgccatcgacatgccgtaggccccggccgacttgagggtcagcagatcgccgcggcgggtcttgcgaagcgtgacgttttcgtcgaatacgtcggtcgattcgcaggccgtgccgacgatggtgtacttttcgcgcacctcgtcttccgaggtgatgttttcgatgttgtggtacgaaccgtagagcgcagggcggatcagctcggtcatgctggcatcgacgatcaccagcttgcggcccgtggcggtggtcttgttgaaaagcaccgtcgtaatcagctcgccgcactcggcgacgatcgaacggccgaactcgaaatgcacttcgcggtcgccgacggcgaggtggttgtgcacgatcgagaagagcgacgcgaagttgggaataggctcgttctcaggcacgtcgtaattaacgcccaagccgccgccgacatcgacgaagcggaacgagaagcccagcttttcgaggttctcgacgatgacgttcaccttgttgcacatgttctcgaacacatgcagctcgcggatctgcgaaccgatatgcaggtggatgcctacgatattgatatgcttgagcgacttgatctccttggcatgctcaagcacctcttcatatgaaattccgaacttactgtcggcctgaccagtatcaatgcagtgattggtcttggggtcgatgtcggggttgatgcgcagcgccacgtcggtcttcttgccggcctcgcccgcaagccggtccacgagctccagctcctcgatcgattcgcagttgatcgccatgatctcctgcccgatggcgtaacgcagctccttgtcgcgcttgccgacgccggcgtaaacgatgcccttggggtcgaatccggcttcgacggccttgcgcagctcgttgccgctcgcgcagtcgatgcccagcccgtattcgcggataatagccagcagatggtcgtcatagttggctttgatggcataatgcaccttgtagccgtactttttggactcgtagacgacgctttcgagggtctggcgcaacagcgccgtatcatagagatagaaaggggtttcgtagccccgaagcttttgtgcgatttgtctgctcagcattttatcctaacttttacctgattgaagttgcaaatataagctatttggtttatttgagcaaatccacgattattccggcggccagcgtgaggctcgcaaggccgttgagcgtgccgaaagcgatgccgatattgcgctggcgcgagggcgtcacgagcaggtgttcgagcaccagcaggcccgtgaaaatcccggctccggtccagaaccacgccgaaccggggcagcaggaggcgaaccacaacagggcggcgacgctcacagcgtgcagaccgcagctcaacgccagcgccgtgcgggccgaaaagcgcgcgggaatggagtgcaggcccctttcgcggtcgaaggcggcgtcctgcagggcgtagatgatgtcgaagccgccgcaccacgtcatcaccagcagcgagaggatgcagggttcgagggcgatacgccccgtgacggcgatataggccccgacgggcgcgatgccgagcgaaagccccagcaccagatgggccagcgcggtaaagcgtttgcagtagctgtagaacagaatgatgaacagcgccacgggtgacagcagggccgtcagcaggttgatcgtcgaagcggcggcgatgaacagcagggcattgaccgccacgaagcggagggcatgccgggccggaatcacgccggcggggatttcgcggcccgcggtgcggggattttcggcgtcgatgcgacggtcggcccagcggttgaagcccatggccgtattgcgggcgaagaccatgcagagcaggacctgcaccgcgcgcgtgagccaccacgccgcgtcgtgcgccccggcaggcagcgtcgcataggcgtagacgaagccgacggcggcgaaaggcatggcgaagatcgtatgggcgaacttcaccagcgaaaggtatttcgatacggtattcatgcgaaaacggtgtttgcggctgcaaagatagcgaaagccgagggcaatcgcaaaacgagttcggattgccgggacgggccggaaaagcggggcggcaccggcgcgacgaaaggggaaaatcaggatcgcacgattttccggcggggcagggcggacgcatccccggaaatccaaaataattcgtatatttgcacacatttttagacgaatatatgaagaacatacgcaatttttgcatcatagcccacatcgaccacggaaagagcacattggcggaccgtctgttggaaaaaaccaacaccctgaaccagcgcgaaatgcaggcgcaggtgctcgacgatatggacctcgaacgcgaaaagggcatcaccatcaagagccacgcaatccagatggaatacaaggcccgcgacggacagctgtatacgctcaacctgatcgacactccgggacacgtggacttctcgtacgaagtttcgcgcgccatcgcctcgtgcgaaggcgcgctgctggtggtggacgccacgcagggcattcaggcgcagaccatatcgaacctctatctggctgtgggacacgacctcgaaatcatccccgtactgaacaagatcgacatggactcggccatgatcgacgaggtgaaggatcaggtgatcgacctgatcggatgcaaagacgaggacatcctgctggcgtcgggcaagacggggctgggcgtcgaggaggtgctcgaagcgatcgtacagcgcattccggcgcctgagggcgacgagaacgcaccgctgcaggcgctgatcttcgactcggtgttcaacccgttccgcggcatcatcgcctattaccgcgtcttcaacggccggatccgcaaaggcgagcacgtgaagttcttcaacacgggcagtcagtacgatgccgacgaggtgggcgtgctgaaactcaagatgcagccccgcgacgagatcaaggccggagacgtaggatatatctgctccggcatcaagacctcgtcggacgtgaaggtcggcgacacgattacgacggtgacgaaccccgcgcgggaagcgatcgccggattcgaggacgtgaaaccgatggtcttcgcgggcgtctatcccgtcgaagccgaccagtacgaagacctgcgcgcgtcgctggagaaactccagctgaacgacgcgtcgctgacattcgagccggagagctcgctggcgctgggattcggattccgctgcggattcctcggactgctccacatggagatcattcaggagcgcctctaccgcgaattcgacatggacgtcatcacgaccgtgcccaacgtgtcgtaccgcatcaccacgacgcagggcgacgtggtggaggtgcacaacccgtcgggactgcccgaagtgaccaagatcgccaagatcgaagaaccctatatcctcgcgcagatcatcaccaagtccgaatttctgggcaacgtcatcaaactctgcatcgacaagcgcggcgtgatgaaaaaccagaccttcatcacgcaggaccgcgtggagatcaacttcgacatgcccctttcggagatcgtcttcgacttctacgacaagctcaagagcatttcgaaaggctatgcgtcgttcgactaccaccgcacgggataccagccgtcgaagctcgtcaagctggacatcctgctcaacggcgaaccggtcgatgcgctttcgtcgctcacctatacggaccacgcctacgacttcggacgcaaaatgtgcgagaaactcaaggagctgatcccgcgccagcagttcgacatcgccatacaggccgccatcggcgccaagatcatcgcccgcgagacggtgaaagccgtacgcaaggacgtgacggccaagtgctacggcggcgacatctcgcgcaagcgcaagctgctcgaaaaacagaagaagggcaagaagcgcatgcgccagatcggcaacgtggaggtgccgcagtcggcattcctcgccgtattgaaaatggactaaacgaaccgaccatgaagaagaccatcatcgacctgttcgaaagctccgtggagaaatacggtgccaagacattcctgctggagaagaaacaccgggcgttcgagcctacgacctacgccgagaccaaggagttggccttggagaccggggccgggctggccgcgatcgggattcgccccaaggacaaagtcgccatactggccgaagggtccaacgcatggatcgtctcggagctgggcatgttctacgccggggcggtcagcgtgccgctgtcggtcaagctcgaagagtcgaacgacctgctgttccgcatgcgccacgccgaagtgaaggcgctgttcgtatcgaaataccagctgccgaaaatccgccgcatacgcgccgagctgcccgaagtcaagcatatcatcgtcataggccacataccgctggagccgggcgaaaccgcgctgggaacgctccgcaggctgggccgcgactatctgtcgaagcaccgcgaggagttcctcgccatcgggcgggggatcgggaacgacgactatgcgacgatcacctacacgtcgggcaccacggccgaccccaagggcgtcgtgctgacgcaccgcaactacacggccaacgtcgagcagtcgctttcgcgcatcgacattccgtcgtcgttccggacgctcatcatactgccgctggaccactgcttcgcacacgtcgtggggttctacatcatgatcgcatgcggcgccacggtggcgacggtgcaggtcggagcgacgccgatggagacgctcaagaacattccgcagaatatccgcgaagtgcgcccgcacttcctgctgtcggtgccggcgctggccaagaatttccgcaagaacatcgagggttcgatccgcgccaagggccgcttcacggagcggctgttcaatctggcgctccgcacggcctacctatataataaggacggctacggccgggggcagggctggcgcgtcctgctgtggcctgcggtcaggctgttcgacgccgtgctgttccgcaaggtacgcgaagccttcggcggaagcctgcgcttcttcgtgggcggaggcgcgctgctcgacgcggagctgcagcggttcttctacgccatcggcattccgatgtttcagggatacggactttcggaggccacgcccgtcatctcgaccaattcgcccaaataccactggcaccgtttcggctcgtcgggcaaaatcctgattccgctcgacctgaaaatcgtggacgaagcgggccgggaggtgccgcgcggggaaaagggcgaaatcgtgatccgcggcgaaaacgtaatggccggttactggaagaatcccgaagcttcggccgagaccgtccgcgacggatggctgcacacgggcgacatggggtatgtctcgaaggacgacttcctctatgtgctgggccgcttcaaaagcctgctgatcgcttcggacggagagaaatacagccccgaaggaatggaggaggcgatcgtggacaaatcgccctacatcgaccagatcatcatacacaacaaccagagtccgtttacgggcgccatcgtcgtgccgaaccgcgaagcgctgcggcgggagctggacagccgcggaatcgcgggcgaaaagcgggcggagacggcggcggagatcctcggcggcgaaatcgaccgttaccgggccggcggcgtattcggcggggagttccccgaacgctggctgccggcggggctggccatcgtggacgagccgttcaccgagcagaacgggctggtgaacagcacgatgaaggtcgtgcgcaacaaggtggaagcgcatttcggcgaccgtctcgattacctttacacgcccgaaggccgcagtctcaaaaatgcgaaaaacctcgcatcgctgaaaaaaatcgtggcgtaaaggtaaatttaccgccccgaaaccttgaaaaatcgaaaaatgcggagtatatttgtactccgaaatgcgggagtagctcagtggtagagcatcagcttcccaagctgagggtcgcgggttcgacccccgtttcccgctcataaagccctgcgaaagagggcaaacgtgcaaaagccctgtgtatcgacgatacgcagggcttttctcgttcaaatccgataacgacagaaacaaaaagcgcaaaacgccccgtcagatcaaccggccggacaattcgccgagccgctgcggcagggcgcatattttcagcagggagtcgtaacgggcgaaatccagcaggtcgtgattaccgatgtccacgccggcttcgcgggcttcggcgaccagctccagcagacggcggaactgcctgtagaggacggaattgcttgtagaggaccgccgccgcggtctacggatgcgtctatatctgcggctgaccggagacgcgacacgatgaaaacgaccctcgacggggtcgtttttttgttgccgcacgtgtcaggtcatgcaaaaaacggagtttcaccgcaggcggattttccccggaccgagcggagggcgaggaaacggcatgcgccgttcgggcgagtcggcagggcagcgggtggcgggcggcaaggcggcaggacggcaaggtggcaaggcagcgggcggcaggctacaaggcagcgggcggcaagacggcgggcggcaagacggcgggcggcaaggcggcaaagtagcaggacggcaaagtggcagggcggcaaagtggcagggcggcaaagtggcagggcggcaaagtggcagggcggcaaggcggcaaagtagcaggacggcaaagtggcaggacggcaaagtggcaggacggcaaagtggcagggcggcaaggtggcaggacggcggtcggcagggcggcagaaaaagaggggattgcgattttttttgaaaaaaaattaaaaaccattttgtccgaaaatcatatgtccccgcatcccggaggcaaggccgcgtcatcgcagcggacagatccggggcgccgcccacacaaacaaaaaacgggcgagacccataacgtcccgcccgttttagcaccgggattccaaccgccgggagccgccggacagcgaaaaagcgcacggagaagcagcccggcatctgcaaaaggccaacgcacaggttctcaatacgctgttcggacaccgggaagggtgcaatattatccgcacggccgccgttagtaaaataatagaacgcaacttttcgatctttttacattccgatcattctttccaagcgcacagccggccccttccgtggtctttcccgttcccggaactgtgcccggaggccgagcgggtctccgtttccgcaaatcttcgcaggcatcgtgcggcctttgatttgcggttttctatcttgtgcacgatttcacacaaaattctattctatgacgtattcaccggattcagtcggcatgcaccgacacacgtttacggggcggcccgcattcacggggcagccccgcagtaaaacgccccccgatttcatgtcctgcttcgcactccacgtcgccgagtgcgaacaaacgggaagagacggttccgccgcaaactacctgacggcataccgcatgctcgtcaaatacatgaacggccgcaaactgctgcccgaacaatttaccgccgaatggctcgaacgttacgaacgatggcttctggcaagaggactggggacaaacagcgtcgtgttccacatgcgctacctgcgggccgtctacaacaaggccgcggacaggggcagcttcatcgcatcccgcggcaatccgttctaccgcaggcatatcaggcaggtggcgacccgcaagcgcgcgctaccgcgcgaaacgctcaggcggatcagcgacgccgacctgtcagaactgcatccgaaatatgcgctggcgcgcgacctcttcatgttcagcttctacacccgcggcatgtcgttcgtggacatgatctatctgcgaaaaagcgacatcagcgacggtgtgctgacatacaaacgaaagaaaaccggccagacactcacgctgcgcatcgaaccgcccctgcagcgcatcatcgaccgttacaacggcgattcaccttatatactgcccgtgctcgcccgcgacgacagttaccgcgcctaccgtcagcaacagcgcgaactgaacaaattcatccggaagatcggcgcgatgctggaaatttccgaaccgctgacattctatgcggcacgccattcatgggcgacactggcacgcgactgcggcacgccgctgacggtcatcagcgccggcatgggacacacctccgaacgaacgacgcgcatctatctggcgcagctcgatcacgacgtcatcgacaaggccaatcggaaaatcatcaacctgtaacgatcaggccgattcaggcagcgttcggatttttctggtatcaggaaaaaattttgcagaagcgagaaacaaggcccattactgtaaataatgggtcttgttcgtgtaaaatgctggttgtcagatgctaaatagcagattcggacacaattgcgggagaaaaaatcgaatgcggtgtccggattttcgattttttaaacaagggacgggttattacgctaaaagtcaattaattagctgtgatgcgtaaatttttttgcatgaaatgtttggttgtgattataaataatcctatttttgccgatgacgggaaatgattataaaacaattgtttacgttccgaagacccattatttacagtaaggggtctcggagacgcagtgtaactatctgactaaaaggctggtacaaattgacactttcacttaagattttatgggcagtaaagattctgctcgcactccgcaaggcgtcggaagccggcgcccctcccatgaagagccgcgaactgatggcggcatgtctgaatccgggcgcggacacctacatgtaccgccgggtcctgcgcgaactcgccgccaaaaccgactatgcgacctgcatcatccagtcgggaaggacctactatgaatggaatcgcaacctgcggccgacgctctacgacctgacgctgcggctggagggcggaatgcacgaggtcacgaacggcttctggtcgtgcgagaaccgccatgtcatgcagcctttatacaaggccaacaagcagtacgaatcgctgacgcgcgaatatctttccaatatccatatcgacgaactcgactccccggcgctctccgcgcgcaaccgggccaaatagccgcacacatacctgcctgcggccggaccgacggaacgacacatcaatcaccaataaacattaaaaaatgaaacgtctctacctcattgcattattcgccctcgtctgcggcggcgcttcggcgcaggagaacggcaaccgggatgcgcaaaaccgcgtcgtacgcggcccctacgaaaccaaccggctctccgacaacatcttcgtcggcgtcgccggaggtataaacctctatttcggcgagcacgactctcagggaaaattcggcaaacggctggctccggcgctggacattcacgtcggcaagtggttcacctcctcgatcggcgcgcgcgtcgggtacaccggcctgcaggccaaaggctggaccaccgccggaaccatgtacgcaaaaaaacaggacggcgactggtttcaggagaagttcggcgtgtcgtacctgcatgcggacgctctgtggaacttctcgaacgccgtgagcggctacaaggaggagcgcacgtggaacttcatgcctttcgccggcgtgggctgggcccgctcctacggcaacgacacccatgacaacgaaatcggattcgacgtcggtctgctgaacgtcgtgcgtctgtgcaaggcgctcgacctcacgctcgaagcgcgctgtctgctggtaaaccagcgtttcgacggcgtatcgggcggccgcatcggagagggaatgctttcggtcaccgcaggtttggcgtacaaattcaaccgccgcggattcacacgcgtctcgaaaccgcaggcggtggatttcacgccttacctcgaccggatcaggcgtctcgaagagaacaacaacgacctcgcatcgaaaaacacggcgctcagcgacgagaacgagaagctgcgcaacatgccgcccaaggtcgtagcagagaagaaggtcgccgcatcgcccgtagcgctcttcttcaagatcggcagggccacgctcgacagcaaggagctgacgaacctcgaattctatgtcaggaacgccatgaaggccgacaaggagaagaccttcacgctgatcggttcggcggacaaggccacgggcagcaaggagctgaaccagcgtctgagcgaacagcggatggagtatgtctacgacctgctgaagaacaaatacggcatcgcgcccgaacgcctgatcaagaaggccgaaggcgatacgaacaaccgttttgccgagccggagctgaaccgcgccgtcatcgtggaataacccccgaaaacgaccgattcatgtcccggaccgcagcaaccgtcacgaatgaaacgccctccggggcggcgcatcacctgctggcatatctggaggaggggagggtgcgcgtgtacgctccccgccggcagagcctctggatcatgcagcagctcccgcaggcggaggagctgaggatcgaaacccagctccgcgaactgcaccggaccgggcggcggacggccgtggtggaggtgcagctccgcagggacgaagagacgttccgcgtaagggtgctctgcgtaagggcctgatccgcacgaatcggaaacgcacgaacagataaaatcaacgccacactcatcaattaaaaaaagcaatgaccatgaaaaaacaatcaatgccctacgaagcaccggagctagttcagatctccgtgcgcgtcgaaaaaggatttgccgtaagcagcgacatcgaaccgggaaccggcggcggcgagctgggaggcacgcgatcgctctcctacgacgattacgaatagcactccgaagtcccgaaaattaacgttcaaaacaaaaagccttatgaaaaaactattcgttatagcgatgctcgccgcagccggcatgagcgcatgcagcaaagaagagactgcgacgactccggcagaggcgaaatacattcaggtaaccattccagaggatgcggtcgccggcgaaacccgcaccgccgtagacggcacggagacgacttgggtgcagggcgacaaagtcgccgtattcctctacaacggctccacgacgcagaagttcgaattcacggccgacaaaacgggcgccacaaccacctttaccggcgacgtgcccgtaggcagctactcgctggcggcggcacactatccgtacagttgcggcgccacgttcgacgccgtaaacaaggtcttcaaccacacgtggggcacatcctactgtacggagaatctggccgactacgacttcatgtacacgaacgtctgggagaccccgttcgaaatcaacgaggattcgacggtgctgcccgtcaacttcaccttccggccgctgatggcacgcatcaggatgagtctcggactggaaagcaacgagacgcccaagaagatcatcatcagcaccagcggcgacgtaatgccgaccgcgggcacgatcgaccgtctgggcaacttcaccgcatcgtcggtaaccaattcgatcaccattcccacggaccggaaggagtttacgatcggactgctgcccgtaagcatccattcgacgatgaacgtgcaggtcatgaccgccgacggactgacctattcggacaagtcgttcaccctcgccggcctgaagcgcaaccaccactatacgatgagcgtaccgtgcaacagcaagacggtcacgatcggggtacccgacgcggtcgacaagaagtacggcaccgggacgtggaaggacaacggattctatttcgtcgatccccagtacgatcccgacggaatcttcgacggctggtacttctaccgcggagagcttaagaatgacaagaacgacgacgacaaactcaagaagaaccgcatccagctgcaggttccggcaggattcaacgacgacaacaacggcgcgttcgtgacggctccgatccagtgcgacggttcgaaaaccgtgaaaatatcctttgaagtagcgaccaaccgggcattggtgaatataaaatatcggatcggcgtaacgggcaacggcccgattacggaagtttggctccgcgaccggaataacattctgaacggcaacgacagggaatgcaagtcgggagttcagacccacacgttcacggtcacgaacggacagcggatcatggtcaagatactgagcacgggcggcgcctaccacgtcgagttcgcggacttcacctacacggtcgaatagtttcggcgacatgaatgcagctatcgggacggaggtgacagccgtcccgattcagttgtaaaaatacctatctgatgaaagcagcttacacaaagccggaactggagatactcacggtcaggacggaagcgggattcgcgatctcccagccccacggcggcgaactgggtccgagttcagcggattatgcagacgactgcgagtattgaccgaacaccaattcaaaccagacaccatgacacataaacctattttccgcctgttgatactcgcaggactgctgtccggctgcggaaaggatacgacggaacagcccggccccggaaagacggcggccggaggcgacgccgtcagctgccgtcttgcgatcggcaacgacgagacgtccggacaggaaagcgaaacccgcacggcctacggtccccttaccgacggttatttcccgatttactggcgcaccggcgaccgggtgggaatcatcagtccgcagacgactccgcagtgggccgaagtggaggtcaccgtgtcgggcgcgaccgaaagcgaagccgacctgagcgacacgggaatggcatggggcagcgactcgcattacgacttttatgcgttttacccggccgacgccgtacagaccaacagcggttctatcatcgtaacggcgattccggccgtacagacctgcaacaacggcgaatgcaacatgcagtacgcctacatggcggcatgtacgaaaggtgtggaacgcggcgcggaggtgccgttctcgttccgcccgctgatgactaccgtgacggtagacataagattttcggaagcggccgaggtgcagaaactcgtcctgtcgagcgaaaacgatccggtagccggggccttcacgttcgacatcgaaacacatcgggccgccgtcattgaggacagatgctccaaagtgcttgcgttgcacatgctgacgggggaggagccttacatccggatcggcgccggatcgaagatcatggttacggcattcatgctgccgcaggacattcggggactgacgctgacggctgtcacgacggaggggaaaacctacagttacacgactcaagcgacacttaaggcaggcaatcgttattcgtttacgatcagcgacatgcagaagcaggcgcagcagaccacggaggactattccgactggatgaaatacctgcccgacaacgtatacctgtcgcaggtatccatgcccggctcacacgacgcatgcacgatgtacggctcgcattatgaatacaagagcggcatgcccggcgaaaggtatcatttcaaatggctgcaaaacgtcgtattcggctacatgaacgtaaccaagatcatcaaggcgcaggaactttcgatcgaggaacagctggcggccggtgtccgcatgttcgacctgcgtccgtcggcgtcgggcagttcgctgcaggaccttccgattcatcacggcatcgccgcgctgggcgacccgacccgcggcggctacacgccgggcggttccgggcggcaggagctgtcgcccttcatgctctcgcacctgctcgaccgcttcgtgaacttcctgaacgagcatcccgacgagacggtgctgatacatatgaaatacgagaacaccagcggcaccggaaaaacgggctgggacaagagcgtcgtagacctgataaagtcgcactgcagcggacatatcgccgatttccatccccggatgacgctggccgacgcccgcggcaagatcctgttcatgatccgcgaagactacaagtccgccaacggcggccggtatctgggcgcctacctgaactggacgcacgacaaggtcgtgttcgagaccacgctccacggcaatacgggcgaaacggcgccgatcaaggtcaatgatctgtacaacatcaagaacggctcgtcggacggcgtgagcaagtacgccgcgatcgacgagtgcatcgcctacacgtacggcgcgacggacgtcacgcgctggtgcatgaactacgtgagctgttacgacacggcgcactgcagcgtatcgggcatcagtatattcggagccgtgggggattacgactactgcgccaacctgtataacagatacacggcggacaaactgaaccggaaggacttccgcggaaacgccggtatcgtcctgatggacttcgccggagccgaaaacgccacgatgacctacggacagacctactcgaacatgcgggtatacggcgacgatctggtgaaggccgtcatcggcgtcaacaacaaatgggacctgcgccgcaacgcataataaccgccctccggaccgcgcattttccgctccccgtccgaaacacccttacccccccccaaaaaaacctcccggccttggaaaagccgggaggtttcgcacacacaaacattaacaatacaaacaacgcgaatggctgaattatttgttcggtacaaagatgcgggtattttccgaacggcgcaatcgccaataatggggattttcggagcggcggctcccgaattatggtgaaaaggtcggacggaaagaggtgaacagcaactttttattttgaatttcgaaataatgcactatctttgcaggcgaattccaacacgcccggcgaccgccgggattttcgaaaaaatcactttgaaatagaaatatatgcaggatttgaaagcgctcgaagggaaaagtctcgccgaactgcgcgaaatcgccaaagctctcggcatcgaagacgtcatggtaaagaagcgcgaactgattgaaaagatcaccggaggttccgcacaggagatccccgcagagaataaaggcaagcgaggacgaaagaaagaaacgcccgcggcggaaactccggccgtgaccacgcctgaaacagccgtggcagaagcggctgcgaaaacggccgagacgccagcggcggaaccggaaccgatggcagcggaagctccggctgcgcccgcgaaaccgcggggacgcaggccgcgcatgaccaaggcggagaacaccgcaccggtacagccgcaaacggcgctgacaccggaaatgcccgccgaactggagttcccgacgaatggcgcgcagaacgaacctgcggcgaagcccgtgcaggaaacagccgctcagccggagcccaagcggcgcggccgcaagcccaagcaggagcagggacaagagcaagaatccgcacaggcggctcaggggcagactcaggcggaagagactcccgcaccccggccgttagaggaggaggtgattaccaaggacgacttcgccggagaaatcgaaggcgagggcgtgctggagatcatgcccgacggttacggattcctgcgttcggcggactacaactacctgaactcgcccgacgacatctacgtttcgccgtcgcagatcaagcttttcggactcaagcccggcgacaccgtgaacggagcgatccgtccgccgaaggagggcgagaaatatttcccgctggtccgcgtgaacgaaatcaacgggctggcgcccgaatacatccgcgaccgcgtacagttcgaattcatgacgccgctcttccctagcgagaagttctgtctgacgggaaacggacacaacaacctctccacccgcgtcgtggacctcttttcgcccatcggcaaaggccagcgcgccctgatcgtggcgcagcccaagaccggtaagaccgtgttgctgcaggccatcgccaacgccatcgccgacaaccatcccgaagtatacatgatcgtactgctgatcgacgaacgccccgaagaggttacggaaatggcgcgcaacgtcaaggccgaagtcgtggcatcgaccttcgacgaacaggcttcgcgccatgtgaaggtggccgaaatggtactggacaaggctaaacgcatggtagagtgcggtcacgacgtggtgatcttcctcgactcgataacccgtctggcgcgcgcctacaactcggtgcagccggcgtcgggcaaggtgctttcgggcggcgtggacgccaacgcgctccacaaacccaagcgtttcttcggcgcagcccgtaacacggaggagaaaggttcgctgacgatcatcgccacggccctgatcgacaccgggtcgaagatggacgaagtgatcttcgaggagttcaagggtacgggcaacatggagcttcagctcgaccgcaagctcgccaacaagcgcgtatatccggccgtggacgtcatcgcatcgggcacgcgccgcgaagacctgctgctgccgcgcgacgtgatgaaccgtacgtgggtgctgcgcaaatacctctcggacatgaatcccgtcgaagcgatggaattcctccagaaacagatgagtctcacggacaccaacgaggagttcctcgcaacgatgaaccactgacaaccgatccgcccgcaacacaaatcccgaacataaatgaaaaagctgcttattctcttttcctgcgtccttttcgcccacggcgcattcgcatggggacagaagggacacgacgtcacggcctacatcgccgaatgtcatctgacgcccgaagcggcggaaaaaatcgacaaggcgctgaacggacattcgccggtatactatgccaactggctcgacatcgccagccacacgccggaatacgcatacacgaaaacatggcactaccggaacgtggacgaaggcaagacgatcgacacgatgccgggaaacccggacggcgacgtgctgaaagccgttacgacgctcgtcgcagagctgaaggccggcggactgccgtccgaagaggagacgctcaagctcaagatgctgattcacctcgtaggggacatgcactgcccgatgcacgcgggacggctttcggatatcggcggcaacctgcgtccggtattgatgttcggcaagaaaacgaaccttcattcggcatgggatacggccattcccgaagccgcccgcaaatggagctataccgaatggcaggagcagatcgaccggctgacggacgacgaagcgatgctgattcaggccggcgaaccttacgactggctcaaggagacgcacgcgatatgcgtcggcatctacgcagattcgcccgaaggcacgaagatctcctacgactacgtatacaagtacacgcccgtaatcgaactgcagttcctgcgcggcggctaccggctggcacgtctgctgaacgagatttatcgataatccggccggatcaaacgacgaaattacggaaaaatccccgcatatgttgcggggattttcgtatgcagggaccgactacaggaccgaaaggagatatgacccaggcaggtgcgggattaaagtaatgtaacgacttgatttatatggtagttacatttttgtataggagagtaggtaacgagaaggcaacggtttgttttcagcttcttgcgctcaaataccgcatttcaaataacctatcgcaagatacgaaaaattttcgagatgggcaaattaggcagggtcaaccggcgagtgcaattttaagaaattagtttaaagaacttttttagacgaagaaaattttaattttcccgatgtcttctgttcattgtattgcacttgtttaataaactcttccgttaacacaaagaaatctgccccattcagtatatattgcctgatggtttattctgattttcaattgccccttttctgtcaggggaagcatatgaatcgacaaaacatacttttgtaccgatagtttttgcaattttcttatgacaaaagaattcgctgccatggtcgctgtgtcgcaatggtcggggacggcatcaacgacagtgcggtgctggcgcaggccgatctgggcattgccatggggcaggggagcgacattgcgatcgacgtggagaaggtcacgattctttcgtccgacctgacgaagatcgccgcggcggtccgcctttcggccgcgaccgtgcgcaccgttcggcagaaccttttctgggcgtttatctacaacctgatcggcgtgcctgtcgccgctggcgtgctctatccgctgaccaggtttctgctcaattcgatgctcgtcggggccgccatggccctgagtagtgtgagcgttgtggccaatagcctgcagctgagtacaaaacggctcggcacgaaagccgtccataaaataaatacagaatttataaccaaaaaacaaacagccatgaaaaaagagtatcgtatcgaaggaatgatgtgcaaccactgccggatgcatgtcgaaaaggccctgaacggcatcgaggtctccgtgccgttgttactctcgatcctcctgccgcgacggtcgaattcactgggcgggagccggagctggccgaattgcagcgggtgctgggcgaagattataagatcacggagcgttgaaaccccggtctcggagcggccgctatccatctataaaggtattgcggctcctgaaaacccctaaaattaggtattgccgttcccggcgtaatgtcgtttctttgtattactaaaatctgccgagacgctgcgggacggcccgttgcgccgaatgcggaaaacgaagaaaaaattcaaaccgattatgagacatttcgtttattgtgcggcgcttgcagccgccgtatttttccttgctgggtgcggcgggaacccgaataaaaagaacgcttcggagactcaaacctcagaaacgcagagttccgtcatggaggtcgataacctgctcgccgatgctgagaagttgaccggcggcaaggtgacggtcgagggcgtctgcacgcatatctgccgccacgggggccgcaagattttcctaatgggaaccgacgatacgcaggtgatccgcattgaagccggagagaagatcggcagcttcaagcccgaatgcgtgaacaacgtcgtgcgggtgacgggcacgctggtcgaagaccggatcgacgaggcttaccttgccgagtgggagctgcggctcaaggaccagatcgcccggcagcacggcgagggcgaagccggatgcagcgccgaacatcaggcccgcggcgaatcggttgccagcagcaccgaaaagcgtatcgccgacttccgtgcccgtatcgccgaccgcaaagccaaagaaggcaaggaatacctttcgttctaccatgtggacggcgggagttatgaagttttgaaataagaagttttgcacgtcatggggacacggtcgtttatgtccgccgtgaggaaatggagcaggcccgttcaccgcgacctctcctttttcttttcgggcgtactgctgatttatgcggtttcgggcttcatgctcaaccacaaacgcgatttcaattccgattattcggtgcgccggaccgagctggtcttcgcacaggagataccgcgcgccgagcaggagtggacccgtgcgcgggccgaggaactgctcctgcgcgtcggcgaggagggcaattacctgaaacattactttcccgaaccggaccggttgaaagtctttatccggggcggcagttcgctgacggtcgatctggcgtcgggacacgccgtctacgagtcgatccgcaagcggcccgtgctgagcagtctgaaccggctgcattacaatccgtcgcgctggtggacggtcttttcggatgtctttttagcgggattgatcgtaatcgtgctttccgggctggtgatgatgcgcggcccgaaaggattgcggggccgcggaggcgtcgagctgatcgcggggattctgattccgctgctgtttattttcctgacctgatccgggaaactgcgtgtgataaaagggcggacgtcgaaaacgtccgcccttctcttgcgtatgggtttgttgtcatcgttttgccgtgccgaataccagcagcgggacgaagaggaagagtccgaacaagacgacgccgacggtctgccagagccgtccgccgggcgatctgcggcggatgagcgcatagaacgcgccgagcgcgagtcccagccagagggcctgaaacgacacctccgcaatccggggctttacgtagccgtccagcggcgaggtgaacgacagttcgaagggaaacaggtattttgcgtactcggcccatgcctgcggtttctcttcggggcggtattcgtccgccagtgaatagtcgcgggcgttcacggcgacatagcgtttcgattcggcgccttggatggtgaccgtccagtagaacatgtcgccgatgatcatcatgttctcccgtgtggggccgaatttcccgacgggaatctcgtgcagtttgtaatcctccgcaccgagcgtatagaaacgcttttcgctgtccaccagaaaaccgagacttttgcggtcggcgaactccgtgacgaaaatctggccgatttgcagcgagtccgcaacgtcggtacggcgcacgaacgggcggccgcggacctgcttcatgtggtagacgcgctgcgcgtcgtccaccagcaggtagccgttgtcgtaccgcttgcgcgtcgaggggttgccggagacgacgcgggccgggaacgaaaatcccttgtcccgcaggactttggtgaatgccgcgctcttcttttggtcgatggtgttggtctccatatcgacgaactcgattccctcgccggtgatgcggaacacgtccgtcgccggttctaaatcgatgcggtcgggcatcgattccagcagttgatagaccgtcggtctgcggcggttgatttcgccgggcgacgtgcggaacatgaagttcgtgcgctccacgtcgcgcgattcgaccgccacgccctcgatttcggacggaaacctcccttcggcggcgagttggcggtaatagaacgtcggcaggatactgtcgaactgctgctgggtgtaggtgttgccctgcagatcgcgtccggcgacgttgttttcgcggtcgaaatccaccgatgcgaatccgtgcgtcacgcagctgtagagcgtgaacggcgaccacgaaggcgatgcgaacacgaacgcgtagcaccacggcagcagccatgccagcagaagcgccgcaaggaggattattccggttttgatactctttatcatagatttgtcgttttgcgggttaatcctgacatccctgcttgaaacggtataccgaaagcagcgggaagaacagcgaacataccagcagcagcgccagccacggcagcatgccgtcgtaggcctgcggggtgtcggagaggaagaagatccggcagacgcccacggcgatcagcagattcgccagccgccgtttccatgtgggttcgagacagatccatgccgtcagcaggtagagcgtcagcccggccagataccacggcagcgccgtcagcagaatccgcgcgaccagttcgggcgccagcagggcgtggaagtacccccacagcacggcggtttgcacgatgaacagcaatgccagcgctcccagcccgatgcctgacatcagcagaatcatcttccactgtggaaagggcaggtgaagcgtcagcttcagccgtttctgggccatttcggggacgaactgaaccactgcgagcaatacgcccagcagggccggcaggtattggagaatgtcgatgaagacaacttccttttcgagcatcacctcccagacgtgcgccgcacccttgaaggttatcacccgttggacgcgcagcagcgcataggcggtggctccgaagaggaacaatgcgctcagcggatagaagcagcgcattttgatccactctttgtagaatatggctttgatcataattcgggtttagtattttccggtcagtccgatgaaagcgtcttcgaggttcagcgtttcgccgcgcaggtcgctgcagacaatgcccgcgcgctccagcacgccctgtaccgtcgcaggggagtcgaacgaatagagttcggcgcgcccgttcacgacgctcgggtggtagaggccgtcgccggcggggatcgtgacgtcggcgcccggcgtgaaggtgtatcgccggaacgtgccgagcagttcgccgacgggcatctgtaccagaatgcttccgtaatccatgatgatacagtcgtccacgagcttttccatgtcctgaatgatgtgcgaggtaaggaaaacggtcttctcctcgctctgcgcatagtcgcgcaggtattccacgaacaggcggcggtaaccggggtccagccccatcgagaagtcgtcgagcacgagcagatcggcgttctgggcgagaatcagccctaaggccacctgcgaacgctgtccgcacgacatgcgcgagatgcgctgccggggcgccaccttcagcatttccatcagtccgtaataggcgtcgcggttccagcggggataaaaccgcgcatagaaccgttcgatctgctcgatggtcatgaaggcgtactgcacgtgtccctcgatcagcagggcgatccgggcgcgggtttcgggccgcatcgtgcggatatcctcgccgaagatcagacactgtccggcgcgcggttggagatagccgctcagaatgttgatggtcgtggtttttccggtgccgtttttacccaaaagtccgaggatccgcccgcgcggaacctcgaaactcaggtctttgtatatcagccgctccccgtaacaatgggtgaggttgcggcattcgatgacagaatcggtcataaagaatggtcgttcttccggcttacttgatcagcgacgccttcgtattggactcgaagtcgttggtcgagttgttcgagtcgatgagtttgccgctggaaccgctcttgcggatcaccgacttgccgaagcggccggcatctccgtcggccgtaccgcaccatgcgtaacctgcgtcgagcgaagcgtcccacggggcgatgtagtatgcgtcgcggcagcctgtgttcacggcgtcgagtatccattcgttaggcacgcggtagcagttgcgcagcggcagcgtgtagtccgagccgttcggggagtggaagatatactgggcgtctttgagcgggtattcggcgaggaactgctctgcagtcaggccgacgggcggcatggcgatagccacggcgttgaagccgcggttgtggagcacttggaccgtcaatgtcgaagcgtaccatttgtcgaggttgggcacgtcggggttgtcgatatccagatagttctcgttcgacgaaacgtcgtaccactcgaaatcggctttcgtggcgtcccacgagttcgggttgccgatggtgtggttctgggcgttgttgacgacgatcagcgactcgccggctttgaccagcacatcctgtccgttgccgggaatgcagtagaacgcattgcccgcacaacactccttgcggaagtccttgccttcgatcatctcgctgttcatgcccgaattgagtccgctcgaaaggatcagcatcatgccgtcggcatagaggtcttcgtcggagttgttacggatcttgatgtactggtcgcccagccacctgtcaggctttcccgtttcgggaagcgccgtgcctgtgaagtagatctcctcgatcacgaattcgccggcttgcagcgtgatgtcgctctgtttgatggttacggtcgccagaacggtgctcttgccgctccgcgtcacgttcacgacggtcgaacgttccgtccccgtttcgttctcatcgacggacagcaccagcgctttgcccgaagattcggctttattgatctgaacccacgacgcagcatcggcgggaatattcacgtcgaaattttcctcgggcacgtttaccagcacattgccgccgagcgcgcgcaagatttcggatacgacgacgggattgaccgtttcttcgggatcgtcggtgcaggatgcgaagcccgctgcgaagagggccgtggtgagaattaagaaaagctttttcataattggtttttattattggtttgacaaatattggttcgatcgtttagaacaggatgccgaacgtcgccgtcagaacgtgttcggacaatcctccgctgtaaaaccggggcgtccaccccgcctcggcgaagcaggccagattccggctcaggcggcgttcggcccgcagggacacctcgggggagacggcccggccgctcagccgcgccgccgtgtaagtcaggtattccgaaatgttgttcagcacgttgctgagcgaaacctcctcgtcgggcgagacgtaacagccgattcctgccgtcgctttcacgcgccactgcggacggagccattctgcgctgccgcgtaccgctccgcagaactgcgcgagccgcatccgccgtgccggataggcgtacgtggccgtggactgccgccattccgcgcggggactgaacatgtaattcaccgtgccgcaccgccattcgacggtcgcttcggcgtcggcgtgccagatacggttcttatacatcgcctgttcatcgacgatgacgctgtgtcccgtacggtcggctatcatttcgatactgcggcgcagttcatagccgcctccggcgcgcaggctccagcggccgctgcggtaggctgcggagagggtcgcctgacgggttttgagccgggttatggggaccgtgttgttggatttgttgagccgatccgtcgtaaggctttcgaatgcggcacgggcataccagcctttcgcgtgccgcggcatgagctgtgccgccagcagacaaccctttccgtcatagccgatgttgaaactatcgctgttcagtgaatagcgggtgtaataactgcccagtccggtcatatacagctcggaagagctggcgccgggcggatagaaaaagtctatgtcctgatcctgtttatagagccgcccctgcaggtccagccccaaaacgtactgagggaactgcatgcctacgccgagtttgatcgtgaaatccgacacgacgttgtggggccgcggatcgacctgacggtattcctgtccggcgcggtagtcgccccggatcgcaaggtcgaagcgtcccacccggtggacatagccgccgccgaaagcatattcctcggtcgagaggtttcctccggcggaatccgccgtgatgcagggatagagcagcaggtagtcggccgtggagttccagcagacgttgcggcggttgccgcggacgtaccgggcgtctgcccacgctgccgaccgctcgctgagccgccggtagctttcggcataaaatcccccgtcgaaggctccgtcgcccagcggttgcagcagcgcctcctgctcacggcgcaggtcgatgcggagcgagatctgcgaaagcgactgttcgctgcggtagagcatcatcgcgggcgactccgtatgaaatccggctacggcccgttcgtcctccgcgctgaaaacggaagaacgctccaatacgccgagcgtatcgcgctgggcggaagcggcggcgggcagcagcgccagtatcgacagaaaaagggccttcatcatcgtcagatcgattttagtaacaacacgatcgattcgctgtcctctacccaagtcattgctgctggaatctgattgtaatccgtgcagcgcagaatcttcttttctccggtcgaataggtcgcgtcggcttcgacgatgaacgtgtaaacccctttgcggagccgtattgtcgcgctgttctgttcggcggcgggaaatggcacccgctctccggagttgatattgtcgaagtaggagatgtccgtgcgtatttccagcttttcgacggggcggctgtccggcatcacgaaccggatggacagttcggtgaaaatcgaatcgtctttttcgcaggccgaaaacagcagtgcggagagcagaaacagggtccgtatggtagatttcatcatcatcgcattacagtttgaagttgagttccatgccgaaataggggctggaatagcggcgtaccagtgcgctggtctcgtttctgtacgaaggactgtatgtgaacagccggtttacgaaaatcgcaatgttgagccggtcgcggtaaagccgtttcgagattttgagattgacgttcatactgaaaggcgtgagacggtagagataggcttctttcgatacgttgtcgtggatcatatgctgcaaaataccgtcggctgccgactcggccgtaaacggatgttcctgtaactgcaggtcgaggtagctggtcggcgcaggattgcaccattcggccttcatgccggaaaaccactggcattggaacgacgtggagaaaatcagccccagtttgggaatctgggtgtcgagcaggaaattggtgttgcatacttcgtgaaacgtgttgtcgtcctgatcgtaaagcccgatgtaaggatagggcgtcccttctgcgagctgtacggtcgtcaggacgtactggggttcgctgttctcatagcgggttttgaaataggcgcccgagacgatgagtttcgtggccagcccccggatgcgccgcgtggagagcgagaattcgatgccctgcttgaatgtgcggcttccgttggtcttgacgccgacggtctggaataccgttttgtccttgtagggaagccattcgagctgcggcggtccggtgaactccatatccttgagcggtccggtgtcgtattcgcggtaggtccgggtgagtacgtcggtcgaggtgcggaatcccgaggtcatattctcccggaaataggttaccgacaatccgtatccgttccactccgcattgccgcgcacctcccatttgaagttccgcgccgccttcaggtcgtaattggtggggtcgtgcttgaagacttccacattgatacggcgtttcgattcgtcgtccgccgggaaatagttgagccgcgtgtaataggagtagtccggttcggggaagagctggtcgagcgtaggcgttttggtgtgccatcccgcgccgcccgcgaatgtgatgcgcatcgggtcgcctgccatgtcgaacgccggaagcgtcaccgagaggttggcacgcggatcgaaatggaatttgccctgcagggtgtaacggcttccgagattggccatggccgtcgtacgcagtccggccattatctcgatccgccactcgccggccgtaatcgtcgtattgtcctccagaaacgccgagagccggtgcagcgccggcagggcgtcgtaacgccgcggatgggaactcatcaggtcggtaaatgggcgcgtcacgtcgtaaagcagaccgccgccgtaatttttcgacatgttccattcggctccgatgcggatcgtgttgcggctcagcggggtgtcggctcccagcagggctaccgccttggcgttggcgtagaacggtttgttgtccacctgcagggtcgcttcatagcggaccggcagcacttccatatcgaagacgccctcttcgactgccgtgcgtatagggacgttgccgctgttcgctcggtaacgccagcggtcgatcaggtcgaattcggaagagacggaagcggaaaaatcgaagctgcggaaaaaattcgcacccttggattcggcggtgaaattcaccgccgcgacgacgttgttgtaactcgatttgtagcgttcgagggggatgcccgccgggccttcgtcgatatcccggtcgcttttttggcggtcgaaagagccggtgtagtcgagcgatccgcccaacgtgtaacggtaggccgaggtgctttcccagcgtttcttcatgcgccacgatccggtcgcacgctggtagttctggcgcgtattgcgcgggtcgtcgtgggagttgagccatgtcgcgccgacgttcatcgtcagcaggtcggccggagcgccccattcgaatcctttgccgacatagagcagctggctgcccagatccgctttgaagcgggcttcgaggttgcggcctccctccttgcgcttgatcttgatcagtccgctggtcagatcgccgtattcgaccgacggaatgccctgctgaatctctaccgaagctatttcatcggtcggcatcgtgcgcatgtcgacgcctctgttcaatgaaatattattgccgacggtcgttcccgaattgtatgtcatgcccgcgtcgttcgacatcggaattccgtccatgacgaacgaaacgccgagcgatgtagtctggtaatcgctgttcgaggtgccgatctcgcgcagatgaatgtggttcgaggaggaaaacgaggggtcggaggcccgtccgccgggcagcagttcgagcaggtccccgaaactcgacggctggatgtggttcatcgcgtcccggccgatatgcacgcccgagaccggtccccgcacttgggtcgccgtgactacgacctcgcggatctgcgtgtcgcttgtccggagccggacggtccgcagcatgtcgctgccgctgacgggccgtacctccatccgttgggagacatatccgatatatgagatatccgcattgtaggtattcgcgggcagggtgaaacgtgcccggccctcctcatcggtcgtcgtcgcgtaggcctttcctccccccgacataggagtcagcgccaccgtagcatacgccagcggattgtgcagggaatcggtaacttcgaacgtgatcccggcgtcgggccggccggactgcccgtacgtgtacgcaggcagcaggataaatagcaaatatttcaggagtagccgcatagttctgttttcacgggacaaaagtatagcgccccggcatatgcggcaatcgccatatcttggtaaattgcattgcaatcatcaccaataataatgagttgcgttcgtgcggcatcccatcataatgctatccggccgcgccaaaacccctaaaatccggtattgacgatccggtgggaatgctgtttctttgccgtaaaccaaaaacgacgaaattatgactggtatctttttcggcagtacgatgggcacgaccgaggccgtggctgcggatattgccaaacaattgggcgtcgcggacgccgatgtacacaatgtggccgatacgccggccggcgaagtgcagaaatacgacctgctcgtgctgggttcttcgacgtggggcgcaggcgaattgcaggacgactggtacggctttttggatcagctgaaggcgcaggatctgagcggtaaaaaggtggcgcttttcggctgcggcgacagcggttcctatcccgatacgttctgcgatgccgtcgggctgatttacgacggcttgcagcagagcggctgcacgttcgtcggagcctatgcgcccgaagggtatgacgaaacaggttcgctggtctgccgcggcggaaagttcgtgggacttgccgtcgatgaaagcgcgcccgacaagaccgaccggcgggttgccgcatggtgcgaacagattaaaaacgagtaacgatgagcgccgaggagttcagccgttacgattcgatgaagctgttcctgcaccagatttacgagttccagaaaggtgtacggagtctggtgctctgcacgatgtgccgcacctgcgcttctctgctctccgagcggctggaaaggctgggtatcgcttaccggattcagtcggtgaccgacagcaaggtgaatctttacttcggcaaccgcatgtgtctggagaccgtggcgacattcatccacaagccgctcaacgaactctccgccgaggaggatttcatgctcggcgcgatgctcggctacgacatcgccgggcagtgcgaacgttattgcaaacgaaagtctccgggtgtttcatcagaacaagcggcggtcaactgaccgccgcctattcctttctgatctgcgccgtgaacgaatcccccgcgccgacaccgtcggccacttcgacgtgcggcgtggcgacgtacgacatgccgtccggagtgaatacatggcttccgacggcgccgcaggtgagtatcacggtacggagtccgtatttttcgagcaggtcgcggcactgcgcctgtatgccgaacatccggcttacgacggtcaactcctcgtcgtttgttttcagaatattgctgcggcagagcgagtcgtggaccacctccggcgaatagaaatgctgccgcaggttgatgtcgaagatcttataatgtcccgctgcgcaaaaaacggaaccgcggaaaagccacagtcccgattctttgccgttgctctccgttattctgtttcgaaatcatgcgacagcttatgtccgttctcatcgacacgcaacgataccagatggagatgctctctggaaatgtcattatgcttgaaaacaatataaggttgatctccatatcccatacgttccatatactccttggcggtttcccgtaactgttcgcctgtcagtttgtcttcgggcgaaggattcagtaaaacatggaataccgtattggtcgttctgcggttggcttcgaggtatggccggaaactatccatacaagcgtcgatatccattcgcccgtgtttatcgaacggttcgagcatcttctgccagaggagcacttcggcttcatccttatccactttctccttgttataatacaacgctccactgggcgaggggcgcgatcttatattcgcaaccattccttagcttgtttggcaaggttcagtatcttgatactaaaggctttcaattccctcatgcgctgttccaatgcggcgatctgatgcggaatcgtgacgttggaaaagtgcgaattgacgacctttacgacctgattatgcaggctaagtacccggcgccttgtcttatttccaagataggtttcccaatactcgcctccgaaccggacgtacatcttccagcgtatccggctctccgctaatattgtcagtctaaaacgttccatgatgtatcttttgatgacagcttccgcaaacggccatagtcttacgccgtctggcaatcatcagtttttcccaattctccttgcctttcagttctccgagtttacgcacatggtgcataaccagattatccgtagcaccgcacaactcacatttctgagctttcagcctatctataaggcttgtggtgctgacgccgggcattggattcgggcatctgtcaaccgaccgatcataggaaggtctttttcttttgaacccttcattgtataggcgacgttcttttgctttgccgttttttaccgtatacccgactgtaaagactccgttgcgtttgtatttccggcaaattcgtcttactgtggttcggtatttcccggcaaaggttttgtacatactgtactgcatgatgtagtgaaaagtgttcagttcagaagcgttgttagctatcgagtaatagttgtaaaaccctctgatctcggcattgtaactgtcaaggatttcaaggtcgtcattattgataagttccgaccggtgtttgggaatccattgctcgtgcccgttatgatagctgaatttcagcacgccgagttccagcaattttttctttattacttcggtcgtcacctttaatctgaccttgtttccatacacacgggacaggcttccccgtttgttccgtttttgcaggttcgacttgcggacagtcacctcatatccgaggaattttgcaggcttttcagtatgagtgacgagcgttttctcgtccgatagttccaatgccagtctgtctgcaaggaaacgctttatatcgtccttgatctttactttacttacgataattccaatgaggaagtcgtcggcatacctcacatatttaagcctcttgaagtttccgtccatagggtcgaagcacggcatcgcggatcgggttttgtctatctctttgagccgtttgacgagcacttttctttctacatcatttgtcgctgttttgagttcacgcataaccagcctcttttggtaagtgagagcttcgtattcacggcacgctcttaccctgttacccctgtcgaatccggtggcatattctttcatgtacttatccagcttgtccaagtaaatgttcgccagtaccggactgataattccgccttgcggcatgccgctgtacgttccatgaaatcgccattgttccagataacccgccctgaggaacttccggataagccgtatggatcgttcgtcggagatacgttccttcaagatgtcgatcagaatatcatgattgacattgtcgaagaaaccttttatatctccttcgatgaaccacttcttacccgtaaaagtcttctgtacggcattcaatgcggtgtggcagctgcgatgcggacggaagccgtgcgaagtatcttcaaagtgaccttcgtaaatagcttccagtaccattcgtactacctcctgcaccagtttgtcgtcgaaagagggtacgccgagaggtcgtgtctttccgtttttcttcgggatgtgtactcttctcgatggctggggagagtagctttcgtctttcaacgaaaggatcagtttctcaatgcggggaaggctcatacggtcgatggtttctccgtctgcaccttgtgtcatattacccggcttggcatatattcgctgataagccagataatacatttcctcattgaaaagaatacgataaagcctctcaaacctgtattccgtggtttgactatgctttgtcagactgtttaatactcttgcgggacttctcataatgcctctcgcattttccgttaatcgtattaatgaatattagctgccgcccttcgccttgtacgaggctttcccccgcgcggactactacggcggctccgttaccataccggatattcatagaccttcgtccaatagccttacggcattccggtttaggtaatccccgtttacgatataataactatggcacgacagattgtcggatatgacgtccgccttttactgcttattgcagttgcgtcgtgataagttcttgctctctctgtacaactaccacaatgagagtatcacgatatgacgagtatagttaccctaacgtcacagtttcggcaggtaccgctcaggctgtcattcaatcaatccggattttatcctcatatctgtctttcatcaccccattcagtcgcagtccgataactgactgacttatggtttaccccgacatgctacactccctgtccggtttccctctcagataagtcggttgatgataggttatttgcaaagaacacttacctaatagcttgccatcgctatatttattatatcgccttgacgggcgcacagttattggccagtttctgaaattgaaaataaaactcgttcagccgggcaataaactgcgtcttcgacgggtcgcgtttgatgacgacaaactcctcggcgaagattcttttgacgataaaacggctgcggttatgctccgatccggctttgcagagcagttcgttgaagcggatgttttgctcctcgttaagccgaaacgagtatttataactcggcgttcggggcttcttgtcggtctgttttcggttggtatccatatatagcttgaaaaaggggcgcgacttgggagcggccccggcctcgcagagcgaggacctttgtcggacaaaacgcagtttgtcggacaaaggtacacctcgctgttatctggcgataacaaaaatccgcgccggagaatctctgaccaaagtttcgaaaatcctccgttgcggcttccggagccgggtcggttcccggtgcaatattacaaccgtttcggggtgtcccgtcctgaaaaaggtttacagtgattgataattaaagataaacattttggttcaaaaaatattgtcctgatataagtttacatatgccttccgaacaaccgtctttcggccccaatgatgtttgagtttcccggttctaagttccgcttccaagggcgtaagccaatcgcagctggcatgaggtctgagtgaattgtaaaggataacgatctggtcgatgcgttcttttgctgcctgaaaactttcaaaacattcctcgtcgatccattcgctcttcagaataccgttcacccgttcggcaacggcattctcatacggatcgcccttttcagtcatgctgatgcgaatcccattatcggtcagcaatttcacatattctttcgaacaatattggcatcctctgtccgaatgatggattaacccttgccgtttttgctgcggagtctggtctatggccatcctcagtgcacggagcgctccgtcccgttccaatgtcgtattcagatcatagcctacgatccgtttggaataggcatccgttatcaaagccagatatgcaaatccttctttcaaagaaatgtacgtaatatctccgacccataaacgatgcggccgctcgaggtcgaaaccccggatcagattcggatatttacgcatccagtgccgcgagcaggtcgtaacgctgtatttcttccgacgtttgaccagaagattgttttccgaaagcagcgtaaataaccgatcccgactgaccggaaatccgtcttgttgcagcaaatgccacagtttacgaccgccgagcctgggcatcagtttccggtagtaacccacccgctccaaaagaagggtgtcggacaaagatccttccctattacgccgtaaatgtttataataggcctgacgggtatagccgaacaacccgcacagaaacgacaggctcattgctgtgtgtctttctttgagacgctggactgtccggctgcggatttttttagcaggtcgataccgtattcttcttggaggatatctcccatgatctcatagccttccagacgtaataaagcctcttccaagcgccgccgaagggctttgttctcggataataattcactggcttcttcactcgtaacgcgggacatgatcggataaggattaggggtactcacaaagctacaactatttttcgctttccaccgctgacccatcttatgaatcgtagacatgggaataccatgttcttcggagagttggcgagccgtcttgactccgctcaaatactcctgtaaaatcagatgacgcaactgacgcgataaataatgacgtgataagtctgaattcgttttttgctgcataagatttactcttttctgtaaacctttttcaggacgggacagggcaaaaaaaatccatcggtgcggactggagcggtctggagcggacatcggaaccaaggtatttcacccggttgtatcttgcagcatgaaaggtcggttttcttattccgttcattatcccgatataaaccgcatgaaacgggaaacggtattttgaatggtttaaaacataaaaccaaacacacgagctttatgaccgtataacgaatattcaatctcaaaaacattgtaccatggattcattaaaagaaactgacaaacctgcaacaaaccttccgaagcatccccgtatcgaagtcgatgaggagttgatgcgtcagatgatcgccggacaagctcctttggactcgaaagtcgtccgtaggattcccgagccggaagaggaaaatacggacgctcccgagggaaacacatcggcaccaactgctgaaaaaacaaatgtcgacacccaaacgactactgtaaaggagcctgctggattccgacggaaaaagatcatactgccggatttcgaacgcaccttcttcgctccggtagattgccgtaaccgctcggcgatttatgtcagtgcgcaaaccaagcgcaaagtgtcggaaatcctccacctgttggggaatgaaagcacaaggcttacggctttggtcgacaatatgctgcgctttgtcatggacatttatagcgacgagctgaattatctccatgaaaagaaaaataaaagacggccgttttgaaaaagcagaggaatttcgacggcagatcacaggacgggatgaaatccgccgatcgcggctgaacatcagaaccggatcgtcaggagccgcagaatgtcgccttttccgacggtagcgaccagcaaaacgccgaagagggaaatacgcaaggctcgcccctcgggcgattcgcatggccttgcgtatttccatctccggcgataaattccctgccggcgggaaaacttacatcgaaaattaccctgccattgacgaagcaagatcggaaatcgaattagctgtaagatcgtaggtcattactgcgcgaccttgaagacgctgtcgagtttctcgcttaatgccgccatatcctgtccgatcttgtcattggtgattttggcatagatttgggtcgtggtgatccgtttatgtcccagcatcttgcagaccgtttccagaggtacaccctgcgtaagcgtgaccgttgtggcaaaggtatgccgcgccatgtggatcgtcgggttgaacgacagaccggcatgtctggcaacatgacgtaacgacatgttcagtgttttataagtgcctttaagcggaaaaaccttctcgcttgtgcgatatgtatccttataacgcttgtagagcatttcagcggcgggaaggagcttaacacggaactgcgtacctgtcttttgccgtttgtcgataatccaccgctctccgttatcgtccgtatggatgtccgcgtgggtgagtttcactacgtccgcatggctcaaacccgtaaaggcgcagaagacgaaggcatcccggttgatacccgttcggtaattggggagcctgacatccatcacggcctgcaattccgaagcggatagataacgtcgttcagcgtattccgctttgacatagaaccctgcgaaaggatcggcggcaatccagccgttcttatacgccgtgtaggtcatcagcttcaatttcttgagcgtagaatggatcgtcccggagcgcatcccttgtaccgaggagaggtagaccacaaacttttcgatgaaatcccgcttcagctctttgaacgcaatgtccttgacgcggtactcgtattcgaggaaggaggccagacgccggcggcgtttgcagtagtcctcataactggaataagcgcggtctttgcccacgcgcttgcggaaatctgcaagatattcgtcgaaggtctgcaacagcaggcggcagtcgtcacccataccgaggaaagcgttgcggaccttttcggccgtaacgtatgaatcacggtcgcagagacgttggtactgcttgccgatattggtcttgatgttctccaacttttcattgagacgctgggcttcaagacttctgccggaggctttgttggctttggcatcccaaaggctggaacgaacggagagtttgctgctgaactgcgacatcgtgccattgatggtgatacggcccataacgggaacctgaccgtgtttttccgactgcctttttacatagaaaaggactttgaaagtgctgcgttgcataataacttgaactttgtggatgggttaaacgttaagtcaagttatttgttatgcggaaatccgatgcaacaaactgaaaacaaacgccttaatgcaaacaaaagcatttcgggcaggtaacggataagtaacaaaactcaccgtcaaacctgcccgattctgcaattttattgctcggaacagatgcagaacagggaattaaatacttgcaaacaagatatttactcttttctgcattctcgtttacctacaaataccgaaccttgcgggtccgccccggaagtgcagccaccttcgcggcagaaaaaaactccggtcaatcagtcgattgaccggagttttgcgtactcggagcgggaatcgaacccgcacgaccattgctggtcacaggattttaagtccggcgtgtctacctattccaccatccgagccactgtctttcggcgaaagacgtcggcaaaagtacgatttttttacgatttaccaaaatctatgtaacttataatcgcgtcggtttcgtcgggccggaaccagcggatctccccgtcgcggcgaaaccacgtcagctggcgcttggcatagcggcgcgaattgcgcttgatgagttcgacggcttcgtcgtacgaaatacgcccgtcgaaatagtcgaaaaactcgcggtaaccgacggtttgcagggcattgagactgcggtaggggtacacggcgcgcgcttcggcttcgagtccgtcggcaagcatccggtcaacacggcggttgatacggtcgtacagctccccgcggggcatatcgacgccgaccttcacgatgtcgaaccagcgcgcgcggcgcatgccggtccgcagctgagaatagggcagtccggtcagcaggcaaacctccaaagcccggacgacacgcgcgggattgctgcggtccacttcggcgtaataggccggatcgagcgtccgaagctcttcggcaagcctctccacgccttcggacgccagccgcgcggcgagattccgccgcagggtttcgtcggcctgcggaaggtcgtccatgccttcgcacaaggcgcggacatagagtccggagccgccgacggccacgacgtaatcgtgtgcggcaaacagttcgccgagacgcgccaacgcctgcgtctcatattcgccgcagttcaagttgtcatttatgtcatgggatgcaataaaatgatgctcaacagcctgcaactgttcgggcgcaggctgggccgtgccgataggcagcccacggtagacctgccgcgaatcggtcgagagaatcggggcgtcgtagttgagcgcaaggcggatgctcaggtccgtcttgcccgatcccgtcggtcccacgacgacgataagccgtttgtcactcatcgtcgtaattgtcgtccccttcgaaatcgctgaattcgctcatcacgtcgtcgaaaatcgagccttcgcccgaaacgacattcttggacggatcgtactggtcgggggcttcggcctgcgcatagatctcgcgcgggtaggagatgccgggcttcgattcgaagctgcccgtcagttcgaggaaataggcccggtcgccgaagatgtcgaacagatagatgagccggtcgcggttgttgtggatgatctgccccagcgtcaccttttccatcgccagcggggcgtcttccgcaccgtcgtccatatccatccgcgtgaattcgcgcagtttctcccagcggtcgtcggccgtgaagaaggacgccatgcactcctcgtattcgagcgaacgcagaatgaaatcatgaaattcgagcaacgtcgtgtcgtacaacacttcgtaatcgcgcacgaagttgtcgttttcatcgctcaacatccggaatcggaaaaccatcgacatagctgtaggtgtttagaatatatctctatacaaatataatactttttgtcaattcagcgccgcgagaaacgcaattacatcccggtcgtcgggataatcggtcagcgccgggaactgggcgcggccgaatcccgtgcggcggccgtgggaaacgcactccgaaacgacgcattgcagttcggcgtcgtgctgcgcgagccacgcttcgacttcgccgagcgttttgtagcgcgagcaggcgatgcggctcagcgcggcggggaaagcccgctcttcgacggcgacggcgctccccagatcccggaaaggacggcccgtcatcgtcagcagggctttttgctggcggtaattgttccggtatttttcgttcaccgcaggcatccgcagccgcaggtcgtacccctccggaacgaaaagcagcgacacgctgcggcacccaagccccgaataggcccagatatcgtcggcaaggccctccaactgcgcttcggtctcgcggcccgacagcacggcgaccgactggcggctgccgcgcagcagggcggggattccggcgtactgcgtccggaaatagcggttggcgttgtcgctgcccgtggcgatcaccgcatcgaccggcgacgagccgtcgcaaaacccgaccggaacttcgggatcaagctcccgcagcatcccgacgacgtattccgtcagcacccggtccttggccgaaggcttcaccagacagcgatggccggcggccaagacgcacaacaagtcgaagaagccgaccagcggaatattcccggccatgacgaccagcacgcggcgcggcacggcgaccggaacggggtagggggcgagccatgtttcgagccggtcgcggcgaagcatgccgtcggcgattgcggccacggcgcggcggacatccgcaggcgtgaaccagccgttggcccggcaggcacgctccgcgacctcctgcgtaggggcgtcgccgccgaagtcggccagcctgcggcccaaggccgaaaagagttcgattgcgcttttcatggggacaaagatagtgaaagccgaacggcaaaaagaaaaactcgtttgcatttttttgcctgaggcgcatcctattttccgtaaagatcgtgaaaaccgcataaaatatccaaagttgtgctatatttgtattatacggaaagtaaaactcacgactatggaaagaacattcaaagaggcactccgccaccgccgcagttattacgcgctggcccccgaatcgcccgtcgaagacgcacaaatagaggaaatcgtacgcttcgcaatcaagcacgtaccgtcggccttcaattcgcagtccacgcgcgccgtgctgctgctgcacgaacaccacgaggagttgtggaaaatcgtgaagcgcacgctgcgggcgatcgttcccgaagatgcgttcgcacgcaccgaggagaaaatcgagcgcagtttcgcggcgggatacggcacggtgctcttcttcgaagatacgaacgtcgtccgcgacctgcagcagaaatttccgggttacgccggcaatttccccgtctggtccgaacagacctcggccatgcaccagctggcgatatggacgatgctcgaagacgctgggttcggcgcgtcgttgcaacattacaacccactgatcgacaacgaggtacgcaaacgctggagtctgcccgaagagtggaggctgatagcgcagatgccgttcggcactccggcgggcgagccgggcgaaaagacgttcaaaccgctggacgaacgcatccgggtgttcagataagggcattcaggccggtttcgcaataaaaaatccgcagaacccgcagaaaaaatttggagtttcggattttttgtttacctttgcactcgcaattgcgaaacacgccatgcggaaatagctcagttggtagagcgcaaccttgccaaggttgaggtcgcgggtccgagtcccgttttccgctctcgtaaatggttgataatcagtcgattatcaaccattttctttttttcgaaaaatacggaagacgggcagaatgtttgccataacaagcaaaacggcggataaaacaagccgggcatcagagttataaactgctccgatgcccggttattatttttgcaatcacattatttcttttgtccttttggataggtcattcccgcaaaaaaatcttccaaagaaatatcgtaaaattcgcagaatttagaaatcgatcctaatgaggggaatttttgttcactttcataatcccatatctttaagtgagtattattggataaatactcttgtgtatggtcatgctgttcccgaatttcacgcattcgttgagcgaccaaatttactaatatgggatttgtcggtttcagttcgctgaattttttacaaaaaaatcaccatttcaatctttttcattaccccataaaggggaaattcgtttttttgtttatatttgtagaccaaactttaatgtatgcagaaattatgctaactttgcaattgtataattcggcatagccgacggacataacatatagagagcagcaactctttatgccttactgaaaaattaggaacttttcgagaatgaggtataaatgttgccagcccttgttttgttccgtccgtaaggacgggacttgcaagggcgcggtacatttctcattcggggtctcctaataccttcagtaaggaatgttatcgcgtcccttgctttttttatgcctttgcggggcgcggattcacaccaacgaaaaccgaagaaaatgtcccgccgcatccgattccggaattacccgaaggcccaaaatccccattatattttactgctctggcacaatacgggccggacgttcctgccgcaaggttctgcgcggcaggacgtccgtttttgggccggggagcgggggaacgccctcacgccgcacgatccggcgcggcgggcgtcataaggttctctgagcgacacatacaatcccgcattccggatgcagccggcaggcattgcgccggaagcggtccctgaaatctggcagccggggcggtctccgcattgaattcttcctaaagtgaagttgcgtcacttgttcggtcggaaccgcccctttttcaaacccaaaaccacgcgatgaacgaagaggaccccgaattcgagaagaccctgcgggccatcaaccattattacataacgcaggtgggcatctgcaccgcggcgctgagcaaactgcggtcggcggagctaagcgacaagaacatcatcatccgggcgatcatgtgcgacatgcccgactgcggcgtcgagaccgaagcgtcggccgacgattgcggcgtcgatctatgggccgaccgggcggagtatgtgaacgagacgtcgttcaatctctacgtcacgcaggccgaggaaaacgtgctctggaacgccggggagaaaggccggaaaccggggcgtctggcggttccgcagcagcggatcacggtgcggagcgacgggatgggcacggcgccggtcattccgctcatctacctgacactgctgagcgccaaactgctggcgatggcgtttcccgacgggtgcacggacgcggaattgtccggctacaacgacgagcggacgatggcggccctgacggaccgtgtgatgacggtactggagcagctggccctgcgggacggggaggaggagacccgaagcccggcaagctgagcggggacgggcagggtagagtgcggagcaggcgacggggaaacgggccgggccggaacgcagggcagggacgcagagcagggacgcagagcagggacgcagagcagggacgcagagcagggacgcgaagcgggcggccgggaaacaggcgccggggccgcggatgcaaacgggaggggcgcaagagggcgggcggagacggacgacggaagcgggcagcaaagcgggcggcgaaagcgggcggcgaagccggcgaaatacggcagaagagatgaaaagtggggttcatgaccgatttgaaccgcacttttcgtatatttgcatcctgtaaaagccaattcaccccaaacaacagcaaaaacaaccacccatgtcggaaacaaaagtctctgcggcggcatttgcagatacgaaaccccactacaacatactcgacggattgcgcggcgtagcggcgctgatggtcgtctggtttcacgtgttcgaagcctttgcgacaagtcacgtcgatcagagaatcaaccacggctatctggccgtcgatttcttcttcattctgtcggggttcgtgatcggctacgcctacgacgaccggtggaaacgaatgacggtaagggagtttgtcacgcgacggttcatccgtctgcatccgatggtggtaatcggcgcggtgatcggagccgtcatgttctactttcagggctgctccgtatgggacgtctcgaaagtctcggtgacgatgctgctggcagcgaccctgatgaacgcctgcatgattccggccacgcccggcatggagatccggggcgtgaccgaaatgttcccgctgaacggtccgagctggtcgctgttttacgagtatatcggcaacatcctctatgcgctgttcatccgcaggctgccgaccaaggcgctcgcggcgctggtgctgctcgccggatgcggactggcggcgtttgccgtatggggtccctacggcgacatatgcgcggggttctcgctgacgggcgacaacatagccggagggtctctgaggctgttgttctcgttctcggcgggactgctgatgtcgcgcgtattcaggcccgtgaaggtaaagggggcgttctggatatgcagtctgggcgtcgtcgtcctgctggccgtgccgcgaatcggcggagaggaaaactactggatgaacgggctgtacgacacattgtgctttgcgctggcctttccgctgctcgtctacctcggagcgtcgggcaagacgacggacaggacgaccgcaaggatatgcaaattcatgggagacatatcgtatccgctctacatggtgcactatccgttcatctatctgtactatgcgtgggtgaaaaacgggaacctgaccttcgcgcaatcgctgcccggcgcagcggcgctggtcatcgggtccgtgctgctggcatacctgtgcctgaaactgtacgacgaaccggtgcgcaggttcctgacgaagcatctcctgcgcacgcaaaagccggtacggcagacaccctgagccacataacacgaaacagaccatgcaccgcatccgcctcgccatcctcctgttcctgtgcgtctcagccgcaggctgccagcccgttcccggcgttctgctcgacgccgaagcgatcgtcatggagcaccctgacagcgccgcacggctgctggagggcgttccggctccggagaaaagactctcccgacgcaactatgcgcattatgcgctggtgctgacccaagcccggtggctcgcgggggagaacatgatcgacgacacgctttcggacgtagccctcgactattaccgcacccacaccgacgatttcgccgcagcgcacaaggcctattattatgcggccaagatcgcccatcagcgccggcagccggaggtggcgatgacgctgctgctcaaaagccgcgacatgctgcccccgaaaggggagtggaggcggcattacgtcgtggagacatggctcggcgtattctgcggccagcagcatctcttcgaggagaagatacgtcacgcgcagcaggcgtacgcctacgccgacagcatggagcgttacgactggatgtgcatatcgctcggcgacatggcgcacgcctatatggggctggacaattatgacagcatggaatactatgcgatcaaggcgctcaggctcgccgaagagaagggcataaccgaaaacacctccccgaagtgggccatgctgatcgaaagcgccctgaaacggaaagagtaccgcaaggccgaagagtattgggaaaaggggttcgggcacgccccggcatggacccggtattcatggctgagcaccaaggccgacatctgcaaccgcacgggccgctacgacacggcgctggagctgacagacagttcccgccgcatgtgcgccgacacgacgcacctcacctcgcgggcgttatgggcgctcaacacctcgaacgcatgggaggggaaaggcgacgcggcaagaagtctcgaagccctgaagcagtacatccggttcaaggactcgatcgacgagaaggtgcacagcgccgaagtgctcaatatccgcaaactctggcgttacgaacagctcaaaacccagaacgccgcccttcaaagccagaaacagcaccgcgaacgcatcgtctacgagacgattctgatttgcgcggcgctcatgctgctcggcgcatggttgggactgcgcatgtggcaccgcgccaaattgcgggaattcgcccagcaaaagcgcatcctgcggcaggaaaacgaactcgacgccatgcggcgcaaggaggaacacctgcgcacgacctttttccgccagctcaacagccgtttcatcgcgcaggtccggcagggcggggagagcaggaaatgccgcatgtcggacgaagactggaagacgatcttcacccatgccgacgccgtattcgacaatttcacggtccgtctccgcgggcaattcccggcgctgaacgaggaggacatccgctattgctgtatggtgcgcatgcacctgtcgcaggccgaaatcgcgagcgtcgtctgtctggaaaaggattcggtgaaaaaacggctgaagcgcatccgcaccgagaagctggcttccgcgaagggttcgacgctggaggagatcctctcgcggctgtaaaatatacccccggctgccgcccccgacgaatggaaacagcaggcggtcagtctgttgaaaaacgccccgtacattgcgatatccccctgcaaacctccggaaatagccgcggggcgtttaactttgcacacgaaacaagccctgcaatccggctcccgcagcagacccggagagacatacggcaagatttactaatcccaaattcatagaaaaaaatgcagaaattcaactacacccccagcaacccgttcagcggctcggtctcctcgctggccatcggagcaggcatggtcgtcgtacctttggtctatcccttcggcatccgcatcggccgcatgcgcatcctcggcccgacggccgtcacgatcatcttcgtgatcggcggtctcgcgctgctggcattcacggtccgcgaaatcatgcaggcccgcaaactcatcgcccaaggcggcgagatcaccgtggagggcggcaaggtgacgattcccgtcgtccggaaaaaagaggtcgtcaacgagtcgttcctgctttcggaggtggaatacaccaaattcgacgaggaggaaaacgaattcaaaatttcgctgcccgccgaccatcacgtcatccgcggcgcgtttttcgaaaacgcggaggcgttcgacgcgttcaagtccattttcgacaaatagcattgccggccggaaattccggccggtctgcaaacacgacgtacggaaacctgcgccgctgaaacttaccgtataaaacaaaactcaaacgaatatgacaatgcgcccaattatcagactcctcgccgcagccgtcgccgctgccgcaacgatccagtcctgctccaccctgaccggttatccgaccgacgccgaagccagctacgccaaggccatcgaactgacgaaaaagagcgtggacaccgacaaattcaaaatctactcgctttcgatcatggagggagaaacgctctccgacaacctgttcctcgtgacggtgaaactggtgaacaaggacgatcaggcattcagccagagctactacatgaacggtctggagcctaccgacctgcgcgacgtacagagcacgttcgaagctcccgaatacgaaacgaccgtcggcatcgacctgtcggaactcgatcccgcccggatcgccgcccagatcgcccaagccaaaacgatgcttcccgaaggacactcctacaaatcggtaggccgctacgaaatcgaggaggaggttccggccggcaattccgcattcaaccgcaaccgcaaaccgggccaacagcacacctcgttcatcgtccgcttcaccgaggacggcaaggaaacggagagcagcgcgggcaaaacctcgtacatatattacgaagccaaagtgaccgtggggccggacggcacgctcacgatcgaagaaaattgagatttcgatccgaaaaaacgggaagtttcccgttttttttctaattttatatcccgatgccccgccgggacattccgataataccaaaactatgaaaactacacactcattcgtcgctccggtactgaactccacgcagagcaaagtcaatacggaggcctatgagcaggctatcgacaactataacgagggcaaacacctcgaagcgttccgattgctgctcgatcacctgaacccggaattccgcacgaaatacggcaacgccgaaggtacggaattccatattccccacggttcgattctggtaaacatccgcatcggggaggggaagctgcacataagcgcggactttctggagctgcccgaaaagggccacgtcgccatgctgcgtcaggtcgccgacctgaacatcaaccggctgatgctgccgcgcttccgcaaggagggcgacaagctgaagatggaatacgtgtgcccgctctcgcagagccatccgcacaagctttatttcatcctgcgcaacatctgccatatcggcgaccgctacgacgatgaattctgcgccaaattcggcgccaagcgcagttacgaaccgcaggtgacgccttattccgaggaagaggtgacgcgggtccacgaggcggtgcggcagacctgccgcgaaacgctcgaagccgtgaaggagtatgaggcggaacgcaaatacggctactcatggaacgtgatcgacatcgcgctctacaagatttcctatttcgcccagccgcagggccagctgatgaacgacctcgacaaggccgtcgatgacatggacaaggagctgcccgtagccgagctggtgaccaaaggcaaggcgtttcttgaacgcctgctggcgatgccccgcgaagagctggcgcgcgacctctatttcgtcgatacgctggtttcggccaaacgccgctcgtcgctgaacaacgtgcaggagaatttcaaggaggtctacaaggaggccgcggatgccatcgaagcggagaactacgaacggagcgcggtgcgcatactctacaagttctatgagatgtacttctacaacgacgtgcaggacgacctgaacgccgtgatcgccaatgcgctgcgcaaatcggccggaaagtcgatggaggaggcgtcggagattctgttcgaagcgctcgaaaaggtgatggacgacgatctgacgacggacgacgacgacgaggagaccggagagcagggagccgccgcggccgcagccgtggaacaggtacagcagatggcagccgccatgcagggcgagatcgttcagatgcaggccgccatgcaacaggcgctgatgaagggcgacatggccgaatacatgcgtctggcgcaggaattccagcagaaaatgatggaacaggcactcggacaacaaaaataacagctcaaaatccgtatatccatggaacataacaatatctacaagtcggtattcaaagtaacccactcaggcggctccggcagttgtttctacctgaaaaactacgatcttttcgtaacgaattaccatgtggtcgaagggtaccgcaccgtcgccgtacacgacaacgaccgcaatccctatctggcgaaggtcgtgctggtcaatccggcgctggacatcgccctgctggccgccgaaggcgacttctcggcgctgcccgaaatgacgctcgcagcggacgactcgcttaccatcggccgcaaggtatacgtcgcgggatacccctacggcatgcccttcacgatcaccgaaggttcggtatcgtcgcccaaacagctgatggacggcaaatactacatccagaccgacgccgcggtgaaccccggcaactcaggcggtccgatcctgaacgacgcggaagaggtggtaggcgtgacggtcagcaaattcacgcaggccgacaacatgggcttcggcatccgcgtcgaaacgctccacggcctgctcgaatcgctcggcgagctggaccgcacggcattccaagtgcagtgcggcagctgcgaggagctgatctgcgaggaagaggagttctgcccctcgtgcggcgacaagctgcccgaaggcgttttcgacgagcgcgagctttcgccgctgggcggattcgtcgaaagcgcaattcgggaaatgggcgtcaatccggtgcttgcgcgcgacggatacgactcgtggctcttccacaagggcagctccgaaatccgcatcttcgtatacgacggcaactacctcttctcgacctcgccgatcaacctgctgccgaagaaggaggtggagaacgtactggactatatgctcagcgaggatttcggcccctacaagctgggaatcgaaggccggcagatttacatcgcctaccgcatccatctggccgacatcacggacgaatcggaagacgaaatccgcaaaaacatcgtcggactcgcactgcgggccgacgagatggacaacatgctcgtagagcgtttcggctgcgaattctcggaatattcgaaaaccgacgccgaggcatgaccctcgacagcgaacggaaaagccggacctttttgaaaaggtccggctttttcgtatccgcgtcccggccgggtgcgcagggtctaccgcggcgcaagtccgctcagcggaaaatctccttcatttcgagccagagattcatcggccggcggcccttgtaaacgcagtgctccgacaacgcttcgcacaatccgtcatagtttttgaggtagaacgcggagacgcggacgacgcgcctgccggccttcatcagatagcggtattcgtacgcgccgccccggctgacgagtatcatcgaagtgatggcgtcgaaacttttcagatcgtacctgcgcgtaaaacccagccccgcaaacgatgtaacggcaagggtgccgccgtcgatacgcaaccttacggccgagcgtctcagctccccgaacaccagccagcagacacagaacagcatcaggagcgtcacgccgtaaaccggcagccgggatgctccctccgcccggacggcaccgcagatgaacaggccgcaaaacccgataaagagcagggcggccgccacgacgaaatacacctgccacgagaagcgggaaacgacggcgttacggcctgcggcgggtgcatgatcgcgcacgaaaatcgccgtccacaaaaaaagaagcacgcccgcaaaagcatatacgatccgcctccggccgggcgtcgcagactcagtaccttcgggaccggcttcgcctttcagccagacgacgtaagagggggcttcgaacggttttccgccgaacgacagccgcggcgtaaggatatgttttccgggggtgtccacgtcgatccggtatcggtaaatacactcttcccgcccgttcctgctggaataagcggtcgaaaacggggtgcaggtctccgtatcgtccagcaccagcaccggatcggccttgtcgggcttgcgatcgcagaccagccggacgatacagccgcccatggccgccatagccgccgaatccggttccagccggcactgcggctcgcaatgcgccgaatcgggaagcaccgtaatccttttccgctcaaaacaacattcgcgaccgccgacgacggccgtcgttcccggcacgaagacctcgccgctcacgcgcgaacggacccggtagcggtaagagaagagttcggagtcggtccggacgccgttcacgatcgacagctgcgagccgtgcgactgtcccagttcgcggaccagcgtcagagcaccccagcgcggcggcgcgatcgactcgatctcacggtccgccgtgtatgccacctcgaactcctgaaataccgtcggacacgcaggcgtgacctcgacgccgagccgctgcgccctcagggcgacactccaagacaacgccggcaggagcatgaacagaaaataaagcttcctcattgcgggatttcgtaattgcaccccaaagatacgaataaccggctgaaattgcgcaatttcacgccgctttcctgcaacattatccacccggaacgctaaggcgccagcagttcggcgacgggcttgatatgggcgaccatcaccgcaacgaacagcgccagcatgccgtaacgcagccacggcaaggcacgggaataggtaaaacggtttttgcgccgtttgccgcccgcccacgaagcgacgtcctgaaagacgcccagcgggcagatcaccgaacagtagacccgtccgaacaacagcgtcaacaccaagagcgccgcaacgacggcgacattgaccgccaaaacagcgggcagcaactgcactctggccatccagccgaaccacgcatgcagcgtccccgtgaaatcgaggaagagcagcgtaatcatcgtaaagaaaacggccgcggccgcgattctgatttttcgcaacatctggtatagtttattttgtcagattcaatccctgaacccacttccgcacgacgtcccgcgagtctttcacggccccgccgcgtaggggaagcccgccgagcagggtagcgcccgcacaaagtttccgaatatcctcttcgctgcggcccatgcggctgccttcgtgggtcataaacggcacgacggtcttgcccgcccagtcgcagtccgcgaggaacgtcgccaccggcggcgcgaccgtggaccaccaacagggcgagccgacgaaaatcacgtcgtacgccccgacatcgggcagccggcctttcagcgcagggcggacgccgccgccgatctctttcttggcctgatccacgacggctccgtattcggcggggtaggccgcggccggaacgatctcgaaaagatcgccgcccgtcgcttcggcgatctgccgcgccatggcgcgcgtattgccgctgtgggagaaataggccaccagcaccttcgtgccggatgcggtctgcgcctgtgtattcatatcgggtaagaacatcgtcataatcgctatcaaaacaatccgtttcattttgttctctattttaggtttacacccggcggcccagctcatagacttcgtccatcgcaggcattccttcgatttcacccgcctgccaagctccgacgccgtaaacgacaccccgctcttcggggtcgtcgagacagtcgagaaatccgcggaaacactccacggtgcgctccatcatctcaacgctctcttcggcggccgtcaggatgaagtaaaactccttgccgcccatctccgtatagcgggcgcaggtgcggtcgatcagggtcttcatctgcgcgcagagcgtatagaagtaaaccggcgtagccatcacgatcacctccgcgccgatcatcttgccgaccacctcggccgcatcgtcccgctgcggacagggcttcgccccgccgtaacatacgccgcagcccgtgcagtaatttatcttcttatcccggaggaaaatcttctccacgtcgtgtccggcctgctgcgccccggccatgaaacggtcgcacaacagatccgagttgcccccgcgccgcgggctggaggagaggatcaatactttcttcgccatatctatttcttcttttttattcgttttcgggtatcgcttcgttcaggcaggcgatcgcattcagcgtacgcggatagcctgcatagggcagcagctgggtcaccacagccaacaacgtccgcttgtcgttgccgacattcaggttgccctgaatatgtcccctgagctggggttcgcagccgcccagcgtgagcagcatcgagaaagtcagcagctcgcgcaccttcgcatccagcccgccgcgggagacgtaatcgccgaaacagttggccgacaggtagtcctgtatatgttgctggttctccggcgcggcggcgcgcatcgcatcgatccgctccccgaaaatagccttctgcaccgccagtcccttttcgaagcgggtttcgggcgaagtcgccgactggccttcgagcggaagcgcaacgccccgcgccgtcagcaccccgttgacgatatgcacgaaatcgaccgtccgcgccatgccgacgtagggaaccgcctgatagaccacctctttcgcttcgacgggcgtcacacccacgttcagcgcgccttcgagcatcgtccgaaactcggtctgcgcggctccggcaatgcacgacgcgaggatgcacatcatccgcgtcttaacgtcgagatcgccgtagccgagtacttcagcgaacgtaaagttatcaaaaatttcgattaattcgggatcggtcgccgcaagttccgattcgcacccggaaaacagctgcgcacgggtctctacggccgcggcgcgcaggcgcggagccgcgctcttggccgaggacaggggcgctgttgcggacatggacattgccgcaggaatgggcgctgcggaggacatggacattgccgcaggaatgggcgctgcggaggacatggacattgccgcaggaatgggcgctgcggaagacatggacattgctgcggaaacggccgcgaccgaagattcggcagtcgcagcaatcccggcagcgggcgcggtcgcagaggcgggtgtggaggcgatcgcggcaatcccggcggtcgcagcggaatagtgcgcgtcgtccaccggtccgagccacgtattgcggttgatctgcggattggtttcgatcgccagatgcgagaaccaactgtcaggagccgcgccgtgccagtgcgccgcgtcgggagcgatctcgaccacgtcgcccggcagcagctcgcgggccggctcgccctcggcctgataatatccccggccgcccacggcgacgagaatctggccgcccgtatggctatgccagttgttgcggcatccgggttcgaacgtgacgttcgaaatcgggcagttgagcgccccgttccgcgtcagccgggccagataagcctgaccgacaaaatatttcgagaatgtttcgggcagtttatccccgacggggaacacgctgattttcttcggtttttccatattccgagcatttatccggttacacgttccggccgcaagcagtgcggccgcaattatcaaaagaagttgcttcatcgtttcgcgttttcatcatatcctcagttgccgatcagtccatctcgtatttcatcgtccccagccacttcacggtctcaggatcgcggtgtgacagaaaacagctccgccgggtgtcgagcgttgcgatcaggtccatgtcttccggcgcgaggtgaaaatcgaagacgtcgatattttcggccatgcgctccggacgcaccgacttcgggatcacgaccacgccgcgctggatcagccagcgcaggacgacctgagcgaccgatttccggtatttcgcggccagcgacaccagcgtcccgttgccgaacagattgttacgcccctcggcgaacggcgcccacgattcgatctgcacgccctcagaggccatcaccgcggccgcttcggtctgctggcagaagggatgcgtctcgacctgattgacggcggggaccacctcgttatgaaggatcaggtccaccagccggtccggctggaaattgctcaccccgatggcccggacggccccttcgcggtaaagctcctccatcgcccgccacgaaccgtagacgtcgccgaacggctgatggatcaggtagaggtcgagataatcgagctgcaggcgttcgagcgacttggcgaaagcccgcttcgtgctctcgtacccggcatcctgcacccagagtttcgtcgtgatgaaaagttcctcgcggggtacgccgctccgccggatcgcccggcccacggcccgctcattgagataggccgaagcggtgtcgatcgaacggtaacccgccgcaatcgcatcgcatacacactgttcgcagaccgtctcttcgacctgatagacgccgaaacccagaaccggcatttcgacgccgttgtttaaaattctatgctccattttttctccttttattgatttcaaacccgtattccgaccgacggaacctcctttcgttttcccggtttatcgggttcgggtccgtttcacactgcaaaagtagggcgattccggcggggcgtgtcattacccgaattacggttcgtcataccattattaccgattcggccgcgaaggtgcggcgggcatgaaaaaaagcattaactttgtgacagacaacaataatcgaagcatatggacgagatcgtaaaaatggagcacgtctaccagtacaacgaaatgatggggcaggagacgctccatccgctggtcagcgtcatcgacttttcgaaatgcccgaaggcccggcacgcccggcgcatgtacggattctactgcgtcttcctgaaagacgtcaaatgcggcgacatgcgctacggacgccactattacgactatcaggagggaacgctcgtattcatcgcaccggggcaggtggtcggcatcgaggacaacggcgaggtgtttcagcccaaaggctgggcgctactgttccaccccgacctgatccggggcacgtcgctcggacgcagcatggacgaatacaccttcttttcgtacgaagccaacgaagccctgcatctctcggagcaggagcggctcgtggtgctcgaatgcctgcagaacataacgggcgaattgaaccatgccatcgacaagcacagcagacggctgatcgtctcgaacatcgaactgctgctcaactacagcatacgcttctacgagcggcagttcatcacgcgcagcgaggtcaacaaagacgcgctgtcccggttcgaacggctgctgaacgactatttcaaaggcgacacgccccagcgcgacggggtgccttcggtacgctggtgcgcggaacagctgcacctgtcggccaactatttcggcgacctgataaagaaggagaccggcaaatcggcgcaggagtacattcagctgaaggtgatcgacatcgccaaggaacggatattcgacgcgacgaagtcgatcagcgaaatcgcctacgaactcggtttccgctatccccagcacttcacccggttgttcaagaagtgcgtcggcatgtcgcccaacgaataccggacgacaaactgacgccgcaacgaagcattatcgcattcaggcggcggcaaccggagccaccccagaggatcgcatcacccgcgccgacgaaaagcccccgctcgcaatgagcgggggctaaaacatgaaggccgggaatccggcacggccgggaattctactttcccgcgccggaattcgcgccgtgctatttccgaccctgatcggcgacggcggccatcagcgcagcgatctcttcgggatcgccgaggaaataatccctgacgtaattcagcccgtcgtcgaattcgaagacataaggcacggcggtcgggagattgaactccgaaatcgcttcgtcggagatgcctttcaggtgtttgatgatgccgcgcaggctgttgccgtgggccacgaccagcagggagtcgtggcgggcgagcgccggcaggatttcgcatttccagtagggcatgatgcggccgacggtgtcgagcagcgactcggtgcggggcaactccgcttcgggtacgtcgcggtagcggggatcgaagcgcgggttgcgcgggtcctcttcgccgagcggcgccggagccacatcataactgcggcgccagatgtgcacctgctcgtcgccgtatttctctgccgtttcctttttgttgagtccctgcaaagagccgtaatgcttctcgttgagccgccagctcttcgaaaccggcacccaatcctgatccagcttgtcaagtacgacgccgagcgtcttcacggcccgtttcaggtaggaggtataggcatgcccgaacagaaagccctcctcgcgcaacagcaggccggccttttcggcctcggcgacgcctttttcgctcaaatcgacgtccgtccatcccgtgaaccggttttcccggttccatgtgctctcgccgtggcggagcaaaacaacttttttcatcgttcaattcatcgttttttccggttcggcgcgcacctcgttccgcaactcccggtgcacagcgaaatcgttgatattctgcaaagtggtgtgcgctatattatccagcgcttcacgtgtaaagaacccctgatgggaggtcatgacgacattgttgaacgagagcaggcgcgccagcacgtcgtcgtccatgatccggtccgacgtatcctcgtagaaataggcggcctcctcttcgtacacgtccagtccggccgcaccgatcttcttctctttcagcccctcgatcagcgcttcggtgtggatcagctgaccgcggcccgtattgatgagcatgacgccgggtttcatcctgccgatggcggcgccgtcgatcatgtagcgggttgcgtcggtcagcgggcagtgcagcgagatgatgtcggagcggcggtaaagttcgtccagcgacacgtattctatctgcgcccgcacggcatattccgggtcggggtagatgtcgtacgcgaggacctccatgccgaatcccttgaggatgcggatcagttcgcgggcgatctttccggtgccgacgatacccgccgtcttgccgtacatgtcgaatcccagcaggccgtgcagcgagaagttgccgtcgcgcgtgcgccaataggcgcggtggaccttgcggttgagcgtcagcatcagcatcacggcgtattccgccacggcatgcggcgaataagcgggaacacgcacgacgggaatgccgtattccgccgcggctttcaggtccacgttgttgaatcccgcgcagcgcagggcgatcagcttcacgtccatcgccgccaaagagcgtatcgtggcggcatcggccgtatcgttcacgaagatacagaccgcatcggccccctgcgccagcgaagtgttgttgccgttcaggtggctgcggtggtaattgaattcgaatccgtaacgctcgttggcgcggtcgaacgactcccggtcatagggctgcgtgccgaagaaggttattttcataatgcacgattttatctttttcttacttatatagaacggtatacgccgggccgttattacgcgatcgtcacttcgggatcgagatatacgtcctgaatggcgttgagcagggctatgccttcgtccatgggccgctggaaagccttgcggccgctgatgagacccatgccgccggcgcgtttgttcaccacggccgtcatgacggcctcctgcagatcggacgcgccgtgcgactcgccgcccgaattaatcagccccacgcggcccatatagccgttggccacctgatagcggcaaaggtcgatggggtggtcggtggtcagcttcgtgtaaacctcgtcgcgggtcttgccgaaaccgatggcgcggaaaccgccgttgttctccggaagcttctgcttcacgatgtcggccttgatggtcacgcccaagtgattcgcctgccccgtgaggtcggccgaagcgtggtaatcgacgccgtccttcctgaagctcccgttgcgcaggtaacaccacaggatcgtcgccatgcccagctcgtgggcataatcgaacgcctcggcgatctcgaccaactggcggcggctctcctccgagccgaaatagatcgtggcgccgacggcggcggcgcccatgttccaagcgtcgcgcacggtgccgaacatcacctgatcgtaggaattggggtaggagagcagttcgttgtggttgagtttcacgatgaacggaatcctgtgcgcgtatttgcgcgccacggcgcccagcacgccgaaggtcgaagccacggcgttgcagccgccctcgacagccagcttcacgatattctccggatcgaaataggccggattcggagcgaacgacgcgccggccgcatgttcgatgccctgatccacgggcaggatcgacacatagcccgtaccggccagacggccgtgggagagtatccactgcaggctgccgagagtgcggatattgcggtcggactccatccagacccggtcgacggtgtcgggcgcgggaagatacagcagtttcttgtcgatggtccggcacacatgggaaaggtagtattcggccttttccccaagaatttcaatcgtcttgctcataatctttcgtattttacgacatgccctgcaattcagggtccaaacacgacagacggcgcgaaacaaaaactgccccggtatcggggctgcttattttttcgtgttgcggtactcggtgggagactcgcccgtatgcttcttgaaataacgccccagataggactggtcgggaaaatgcaggcggtaggcgatctcctgcaccgacagatccgtcgactgcaggagcatcttgatctccagcagcaccgagcggtcgatgaactccttggccgagctatgcgcgatattgcgcacgatggtcgagagataacgtgtcgaaatgcagagtttgtcggcatagaacgacacctcgcgctgctgcgaactgtgttcgtgcaccagcgcgacgaaacggtggaaaagctccgtctggcgcgtcgtcgtttcgggcgtctgctgctgcatgttggcgtaacgctgcaatttgtcgtaaatctccagcagcacgttctgcaggcggttgcggatgatcgtattgcggaacacattgttgcggtcgcggtaggtgtatgcggccatctgaaaccaagtactggcgccttccacgatgcgggcgggcggataggtgatcggattttcgcgcaggattctgaaaaacgacggttcgagacggaaaccggcttcggcgaaaaggtcgcgcgagaaggcgcagaaggtcatccggaaatcctccgtgcggttggtcagcatcagcagcgagccgggcagcaccagaatcagcgtgttgcgccgcacctgaccgcaatattggtttacggtggcgtcggcgctgcccttgcggcagtagagaatcgccccgccttcgcagcggctcgcataattgccgaaaaaggcgaaatcggactctccgacgacgaactgttcttccggtgtggttattatggggttagtcgctgacataacaattcttttttcgaacaaatttaacgcttttttcattaatttcctaaattttgttccggaaaacaccaacactgttcgcaatataatggcacatcgtcggcctttttacggtacttttgcaccgtaaaaagtttttttagtttaaaaaagaggagaattatgaagcaaacatttgtgaaagcagccgtcatggcctgcttcatggcagccgtttcgtgcggacaggcaccgacggcaatgggccccgcggaatacgccgtgatgaccatagccactaccgaccgcgaaatcccgatcaactactcggcgaccatccgcggacgtcaggacatcgccatctatccgcaggtttcgggaaccatcttcgaactctgcgtaaacgagggtcagaccgtttcgaaaggccagccccttttcatcatagatcaggtgccgtacaaagcggcgctgcagaccgcagaagccaacgtggcggctgccaaagccggcgtagccacggcgcagctcacctacgacagcaaaaaggagctttacgccaagaacgtggtttcgcagtacgacctgctgacggccgaaaacacgctgctgaccgccaaggcccaactcgcgcaggccgaagcgcagcgcgtaaacgccgccaacaacctctcctatacggtcgtgaaggctccggccaacggcgtggtgggaacgctgccgtaccgtgtcggcgcgctggtcagcgcatcgattccgcagccgctgacgaccgtatcggacaactcggacgtatacgtctacttctcgatgaccgagaaccagctgctcaacctgacccgtcagtacggttcgatcgccaacacgctcaagaacatgcccgacgtacggctggtgctcaacgacggttcggtctatgaccggacgggccgcatcgagtcgatcagcggcgtcatcgacacctcgacgggcagcgtacagctgcgcgccgtgttccccaatgcggacggcctgctccatagcggcggcgccggcagcgtgatcgtgcccaacatccacaaagactgcgtagtcgtaccgcaggtggcgaccttcgaactgcagaacaaggtatacgtatataaggtagaggacggcaaagccacatcgtcgatgatcgacgtggagaagatcaacaacggcagagagtatatcgtcaagtccggacttacgccgggcgacgtgatcgttgccgaaggcgtaggtctgctgcgtgaaggtacgcccattgtcgtcaaggggcagggcgccgcagcacagacagctcctgaggccgcaacccaaaccgaaaaggaggaataacctatgacactgaaacattttatcgaacgacccgtactggcgtcggtcatatccatcgtaatcgtaatcgccggtcttatcggtctcgcgacgctgcccgtcgagcagtatcccgacatcgctcccccgacggtgatggtgcgcgcctcctatccgggagccagcgcagagaccatccagaaatcggtcatcgtaccgctcgaacaagctatcaacggggtggaggacatgacctatatgacctccagcgccgcagtcggcagcgcatccgtaacggtttacttccgtcagggaatcaatgccgacatggccgccgtcaacgtgcagaaccgaatatcgcgcgctaccggacagctgccctcggaggtgacgcagatcggtgtgaccaccatgaagcgccaaacctccatggtgaaaatattctcgctttacagccccgacgactcctacgacgagacgttcctgtcgaactatctgaagatcaacatcgagccgcgcgttctccgtatcgcgggcgtcggcgaagccttcacgctgggagccgactactcgatgcgtatctggctcaagcccgacgtgatggcccagtacaagctcatcccgtcggacgtaacggcggccctcgccgagcagaacatcgagtcggcaaccggtacgctgggtgaaaactcgcagaacacgttccagtatacgatgaagtaccgcggacgtctgatgactccggaggaattcggggaaatcgtactcctcgcacaacccgacggtacgatcctgcacctgaaagacgtcgccgacatcgagttgggcagcgaatcctatgcctacaagggctacaccaacggccatccgggcgttagcacgatggtcttccagactgccggttcgaacgccacgcaggtcgtcaacgagatcaacgcactgctcaaagaggtcgaaagcgaactgcccaaaggcgtcgccatcgcacacctgcagagcgtgaacgacttcctctacgcctcgatcaacgaagtgatcaagacgctgatcgaagccatcctgctcgttatcctcgtggtatacgtcttcctgcaggatatccgttcgacgctgatccccacgatctcgatcctcgtggcgctggtcggaaccttcgcgttcctctcggtggccgggttctcgatcaacctgctgacgctcttcgcgctcgtccttgccatcggtacggtcgtcgacgacgccattatcgtggtggaggctgtccaagcgcgtttcgacgtgggatataagtcctcctatatggcaaccatcgacgccatgtcgggtatcacctcggcgatcatcacctcgacgctggtcttcatggccgtgttcattcccgtagccatgatgggcggaacgtcgggcgtattctacacgcagttcggcatcacgatggccgtggccgtcggtatctcggcgatcaacgcccttacgctctccccggccctctgcgcactgctcctcaaaccgtatctcgacgagaacggcgaaatgcgcgacaacttcgcggcacgcttccgcaaggctttcaacagcggattcagcgccatgatcaacaaatacaagcacggcgtactgctcttcatcaagcacaaatggctgatgtggtccacgctcggactggcgttcgccgcccttgtcttactgatgaacaccacgaagacgggtctggtgcccgacgaggaccaaggtacgatcatggtcaacgtcacaacggctccgggcacttcgctcgccgaaacgcatcaggtcatggaagaggtctccgcccgcatcaaggccattccccagatcagggacttcatgcaggtggccggctacggtatgatcgccggtcagggctcgtcctacggtatgtgtatcatcaagctgaaggattgggaggaacgtcccgaaaaaacggatgccgtaaacgcggtcatcggtcagatctacggacgcacggccgatatcaagaacgcgcagatcttcgccgtggcgccgccgatgatttcgggttacggcacctcgaccggcttctccatgcacctgcaggataagtcggacggcagcctgaccgacttctacaacatctacctgcggttcatcggagcgctgaaccagcgtccggagatcgcaatggcctactcgaccttcaacatcaacttcccgcagtacgtcgtaagcatcgacgcggcgaaggccaaacgcgccggcgtatcgcccaacgcgattctctcgacgctttcgggttactacggcggccagtacgtttcgaacgtcaaccgcttctcgaagatgtactatgtgacgattcagtccgacccgaaataccgtctcaacaccgagtcgctcaataacgtcttcgtgcgtacgaacaacggggagatggctccgctgggacagttcgtggacctgacgagggtttacagctccgaagtgctcaaccgcttcaacatgtacagctcgatcgccgtgaacggcaccgccgccgacggatattcgtcgggcgacgccatccgcgccattcaggaagtcgcggcgcaggtgctcccgaaaggctacggttacgacttcgacggcatcacccgcgaggaggcgcagacaggcagcaacacgacgatcatcttcggcatctgtctcctgctgatctacctcatcctgagcgctctgtacgagagcttcctgattccgttcgccgtcattctctccgtgccgtgcggtctgctgggttcgttcctcttcgccaagatgatggggctggagaacaatatctacctgcagacgggtatcatcatgctgatcggtctgctttcgaagaccgccatcctgattacggagtacgccgccgaccgacgcgccgcgggcatgagcctcacgcaggccgccgtatccgccgccaaggcccgtctccgtcctatcctgatgaccgtcctcacctgcgtattcggtatgattccgctggtgttctcgcacggtgtgggcgccaacggcaactccaccctcggttcgggtgtcgtgggaggtatgatcgtcggaacgctggcgctgctgttcctcgtaccgacgctgttcatcgtcttccagaccctgcaggagaaggtcaagccgctggagttcgatcccgatccgcagtgggccgtgcgcgccgagctggaggagtgtaaaaacgagaaagagtaacaagatgaaaaagcttattatcatactggccgcagcggccatgaccggctgcggcatctacaagccctatacgcgtcccgaagtgaaaaccgacggactctacggcacggccgaaaccgccgatacgatgacgatcggcaatatcggctgggaagagatgttctctgatccctacctgcagacgcttatccggcagggactggagaacaacaccgacctgcagtcggcgcagtggcgggtaaaggaggccgaggcgacgcttaaatcggcacgtctggcttacctgccgtcgttcaacttcgcaccgcagggcaacctgagcagtttcgactgggcgacgccgtcgaaaacctacaacattcccgtgacggcaagctggcagatcgacattttcaacggtctgaccaatgccaagcgcaaagccaaagcgctctacgcccagagccgggagtacgagcaggccgtgaagacgcagctgatctcaggcattgcaaacctctattacacgctgctgatgctcgacgggcaatatgaggtaaccgagcagaccgccgtgaaatggcgcgagagcgtgcgcacgatgcgggcgatgaaggaggccggcatggccaacgaagccgccgtcgcccagtacgaaggcacctgtctttcgatcgaagcgtcgctgcacgatctggaataccagatccgtatggccgagaacagtctctgcacgctgctggccgaaggcccgcaccagatcgagcgcggccggctcgaaggacagcggctgcccgacgacctgacggtgggcgtgcccgtacagatgctttcgaaccgtcccgacatccgcagcgccgagtattcgctcatgcagtcttactacgccaccagcgaagcacgttcggccctttatcccacgatcacgctgagcggcacgctcggttggaccaacaacagcggcatggggatcaaggatcccggcaagatactgtggtcggcagcggcatcgcttctgcagccgatctttaacgccaatgccaaccgcgcccgcgtgaagatcgccaaggcgcagcaggaggagaccaagctggcgttccagcaggcgctgctcaacgccggcgcagaggtgaacaacgcccttacgcagtgccagtcggcccgcgcgaaggccgatctgcgggtacagcagatcgaagcgctggagcgcgccgtggagagcacggaactgctgatgaagcatagcagcacgacctatctggaagtgctgaccgcccagcagtcactgctttcggcccagttgtctcagatagccgaccgcttcgacgaaatacaaggcgtcgtgaacctctatcaggctctcggcggcggtcgtgacatggctgaggaggcgaaataatgaagcggggagcgaccaaggaggagatcatccgcattacacaggcgctcatcgcccggaacggcatccgtgccgtccgggtggatgagatcgcccagacgctgggtatctccaagcgcaccctgtatgaaatgttcgccgacaaggacgatctgataaacgcctgtctcgacgcgatgagcagcaagcagcgcgaacgcatcgcaacgtaccggaaacaacgcagcggcagcgccctgcagaggactttcaagctggcatacgaatatatcgccaacctctacatggtcgaaagcagtttcctgtcggacctgcgccataaaataatttatgcggaccatttcgacgaacaccgcgagttctggcgccgcgagctggcgcaccacctcgaagccagcaaggaagaggggttgctgcttcccgaaatcgagggcgcaagttttgcagaccgcatactggagacgattctggaactacggctcaacaacgccacgcgagaggaggtttaccttttttgcagaacgattctgcgcggtgcggcgacccggcagggcatcgaacgcatcgacagaaaacgataaaccgtatttcgtaacatcagaacgcttcgcaacgattcgttgcggagcgtttttttcgacggttcaatagaggaagaggaaggtctccccacacaaaacaagcccgcaggaaaaacctgcggccttgcggttcggaataaccgatacgaatctttaatagagcatatcctcgtcggcttcgtcctcgtaccaatccacatgctgggcgccgcccgatgcggcccatgcgttgaaataggtataggcggtgcggatgtccttgcgctcggcagggtagcggaactcgcccgaaatcatcagcgcccacatcatgtagttgtccttcatacccgttcccttcgacacgaagtatttgtacggctcggcttcggcgaacgtattgcccgaaacgaccgcgaatccggtcggcttgtaggtcggcatatgcacctcggtatcgcggctgaatacgcccgaactcttcgaattgacgacgataaaggcgttgacggccgattccagcaccgcagccgcatcgacgggccgggtgaaagtcacggtagtcgtatgcttcacggtcggaacgggcgccgtacctttggaggtattgatgtaggtgccttcgccgagaatctcctgcgcggtgttgaagagcggaatgacggcatattcgttgccggattcgagacccggtccagcgaatgcccccttgccgaaggccgtgttcgtcgtctcgacactggcgacctgcgaagcggcgaccttgtccagctgcacggcgaacgcattgaggtgcgcggcgccggcggctttcagctcccagttgatgcggatggaacccaccttgccgctttccttgttcacgagccggtcgatgccggtcacgacgaccacgtcgttcatatcgtaatcgccgatccacggccagccgtcctcgaaacaataggtgtagggcgcaccgatcacctcgatgatttcgggttccggctccggatcgggagtcacaggctccttgcctccgttgcatttgctctcggcaatcacgaccgtctgcttgtcgcgcatcacggcgccgccaatcaggctgccggcgtcgatgacgtatttcgcatcggccgcattgtcgtagacgacctccataagtccctcgaacttggtgccgtaataacgcgagctgacgcccttttcccggatcacgaccacggccatcggctggtcggcctgcgcctgactgacgatgcgcacgttgccgcccgatctgctcgcattgtattcgttcatggagaagatcgaaccggctgcggcatacagctccgtattgctgttgaaatataccgttccggcgtcgagacccgaacccgaagcgatgtagaatttcgcaccttcggcaatgacgtcgtccgctgcggtatagcagttcacgtaaagcgtaccgccgccgcgggcttcgagtttatccatcgtggccacacctttctggtaggtcaccgaatagttggtcacgtagaaggtcccgtcgatggcaaccgtgccgttctcgcagttgtgaagctcggcgtaggtattgagccggaaatcggcgctttcgaccttgccgtcattgtagagcttcgccttgttggtgacttcgacttcacccgcctgcaatgcggccgacgctccgttgtagaactcgcaggaggtgttgacgttgaacagtccgttgacaacgaacgtgccttcgttgacgatggtcttgcaggagaagctcgtctgatcggtggtgaaagtaccgccctcgaatacatagatggccggatagaccgcattctgctggaggttggctttcgcctccctgatatatacttcaccgcccggaagcaccgcaagggtcgcctgtccgatagtaaccgacgcattgagcgtcagtttgcccgccacgtagagaaccggagcggaatggggcgagaacttgccgttcaaattgatattgcccgtaatctcggcgcccgcgggaatgtaatattccgccgccgcggcatagggtttggcgatccagatggctccgaggtcgatattgcccgccggcgtctggcggataaccgcgccttcggcgaagtcgctttccgtcttaaccggcaatgtcggataatcgggcatcgacgagctttcgctgcgtgtagcagcggaagtgcggattttgtgcgcttcggcgcttttcatcacggcgcccgcaacattgagagccgcggaaaccggctgcatgctgaccgacacggtaccgtcgggcagggtagtctgcacataaaggttcctgaccccggcgggcagcgtcatggccgtcgagaaaacaggctgcgaagcctttaccttgtgcattgcgcacattcttcgagacaaagataaacattattttcaactccaaatcatttccgctcatttatttaacaaaacaggccacaatcgcatctttggcatgcaaaattccgaccgagggaaaggtttttccaaaaaaatatcccgcggcgagcgtaaaactcaaaaaaaccgctatatttgcaccattggaaacagatccgaagctgaaatgactgcaatgaacacatacgacagcccgtaccgcggaacactccgcggtatgatgaccatgggtatgatgtgcatgcgcagccgattccgccgggtgtaacctttccgtatgcacgaacgacacaatccggcttcctttgaggtcggatttttttgtaacgaacaaacagcgaaatatgactccgaaaaactaccgattcgaaacgctgcaggtacacgcaggccagcagcccgatcccgtgaccggttcgcgcgcactgccgatctaccagaccacgtcctatgttttcgacagcgccgaacagggcgcggcacgcttcgccctgcgcgaagagggtaacatctacacccgtctgagcaatcccacgacttcggttttcgaagagcgcatggctgcgctcgaagggggcacggcggccgtggccgccgcatcgggcatggccgcccagtatctggcgttcagcaatctggtcgaagcgggcgacaatatcgtcagcacgtcgttcctctacggcggcacgttcagccagttcaagcatacgttcgcccgcatcggcgtcgaagtgcgcttcgctcagggcgacgacatccgaagcatcgcatcgctcatggacgaccgtacgaaagcggtttatctggaaacgatcggcaatcccgaattcaacgtacccgacttcgaacccatcgtcgcgctggcgcacaagcacggcattgcggtagtgaccgacaatacgttcggcgcgggcggattcctctgccggccgatcgaatggggcgtgaacgtcgtgacgcactcggcgaccaagtggatcggcgggcacggcacgagtctgggcggggtagtcgtggacggcggcaacttcgactggggcaacggcagatatccgctgctgagcgaaccctcggagggatatcacggctttaatttctggaaagagtgcggcaaaaccgcctttgcgacccgcacccgctgcgaagggctgcgcgacatcggcccctgcatcagcccgttcaacgcgttcctgctgacgcagggactcgaaacgctctcgctgcgcgtacagcgcagcgtggacaacgcacttgcggtcgcggagtggctggaaaagcatcccaagatcgaacacgtcagctatccgggactcaaaagcagcaagtaccacacgctggcgaagaaatacctccgcaacggtttcggcggcgtgctgacgttccgcgtgaaaggcagtgcggagcaggcgtcgaagatcgtagacaacctcggtctgatcagccatctggccaacgtcggcgacgcgaaaacgctgctcatacaccccgcatcgaccacccacgcccagctcggcgaacaggaactggccgcttcgggcgtatatcccaacctgctgcggctttcgctcggcatcgagcatatcgacgacataaaggaagacctgaacgaagcgctgaaacatctgtaatggaaccccgcatttacatagcccccggaccgttccggctggaaacgggacacacgctgccggagctgaagatcgcctatcacacctacggcgaactgaacgccgcgcacgacaacgtggtgtgggtatgccatgcgctgacggccaattcggacgtcgcggactggtggccgcacacggtcgaaacggggaagttcctcgatccggcgcgtcatttcgtcgtctgcgccaacatcctcggctcgcactacggcacgacgggaccgcttcatacgaatccgcaaaccggcacaccgtactaccgggatttcccgcccttcacgatccgcgacatcgtgcgggcgcacatcctgctggccgacgccctcggcatcggacgcatcggcgcgctggtcggaagttcggtgggcggatttcaggccgtcgaatgggccgtcacggagccgcagcgcatcggcaaactggtgctgatcgccacctcggccaaggcgtcgccgtggagcatcgccatcgacgagacacagcgcatggccatcgaagccgaccggacgttcggcgagccgcgcgacgacgcgggaatggccggtcttgcggcggcccgcgccatcggcctgctgacctacaggggatcgctgggctacaacctcacgcagcaggaccgcgaggagcttccggccgtgcaccgcgcatcgagctaccagcagtatcagggagagaagctctgcagacgctacaacgcctactcctattacgccattctcaacgcattcgacacccacgacgcaggacgcggacgcggcggggtagcggccgccctgagtcggatcgcggctcgcacgatcgtcgtcggcattacgaccgacatcatcttcaccccgaccgagatgcgtgacctgcaaggcatgatcgccggaagcgtctaccacgaaatagactcgccgttcggacacgacggatttctggtcgagcacgaacagctgaacgacatcctccgtccgttcatgaataacgaataatcaacaaacatgcagcatatgggtaaaattaaaatcggcctgttcggattcggcgtcgtcggacaaggtatttacgaagtggtccgcaaatcgaagaacgccaatgccgaaatcgtcaaaatctgcgtccgctcgctcgacaaaccccgttcgatcgaccgttcgcacttcacggactctccggcggagatcctcgacaatcccgaaatcgacctgatcgtcgaggtgatcgacgacgccaaagcgtcgtacgacatcgtgaaaagcgccctgctgaaagggattcccgtcgtttcgggcaacaagacgatgctggcgcaccacctgcccgaaatgatcgaaatccagaaaaagcacaacgtggcgctgctttacgacgcttcgtcgtgcggttcgattccggtcatccgcaacctcgaagagtattacgacaacgacctgctgctcgaagtgaagggtatcctgaacggttcgtcgaactacatcctctcgcgcgttttcgaccacaaggattcgtacgccaacgcactcgcgcaggcgcaggcgctgggattcgccgaaagcgacccgtcgttcgacatcggaggctacgattcgctgttcaagctggtaatcatcacggtacacgcactgggcacctatgtcgcgccggagcgtatcttcacgtacggcatctcgacgattcacgatgcggacatccagtacgcccgcgagaaaaacgtcaaaatcaagctggtggcgcaggtcgtgaaggtgagcgacgaacacttcacgatgttcgtcatgccggagttcgtgacgcccgccaagtatatctacagcgttgacgacgagtacaacggcgtggtgatccgcggcgagtgctacgaccggcagttcatgttcggcaagggcgccggaagccttccgacggcttcgtcgatcctgagcgacatcatggcccgcctgcacggctaccgctacgaatacaagaagctgagctatatccagaagcccgactatacgaccgacatcacgctgaagatatacgtccggtacacggataccgacattcacggcatcctgaacttcacgaagattcacgaacagtacaccagcgaaaagagcaactacgtcatcggcgacatcctgttgagcgaactgatcgccaaacgcgaccggctctgcggcgacgacgtgttcgtggccaatattccgatcttcttcctgaaccgcgactgacgccgggcgcgaccgggcaaaacacaaaaaacgcagtgcaaccgcactacagaaaaggtccccgttttcggggacctttgtttcgttgcagcgcttcagcgcactatttcgcgtctttcacgcagcgaagcgaaactccgttacccgccggcagcgatgaaggcgacggattgccgccggacgcatagaacaacagcgcactgtagctgcttcccccgtcgtcggtcgcggcgctcatcagataaccgcttttagcagacgagacatagttctttgaaacggaattccacatgccggcgagcgtaaatccgcaatcgggacccacggccagcgtttgcagttcgtcgatataaggtacatgccagccctccgggcagattccccggaccggagcgccggaaacggcctgtgcgccgcccagcgccacagtaaagctgtacagcatgccgtgttcgcggacgtactccgcatcttcgttgccgtcgggataccaaatgcccttcgtcagcaacgcttcgtcgggcacatagcgcaggttctcggccatccagaccgtctccccgacagtcgtcgtccggtaggtcacgcccccgtaggagagcgtctgcgaatcgtcgccgtcgtcaccgccgccgctgccgtcgagcgatccgccgtcttcccaatcaccgatatcgccgctgagcgaaatttggatctcctcgttggtaacgagaaccgacatatcgtaccgtctgccgctttcgagctgtgccgaagagagggttttagtgtggctcctgccgtcgtccgtggtgaccgtgacggtcagggcggcctgctggggcgccagtatcacgcgataggtagcgccgggcttcacctcgcaggctttgacctccgcagcggcaacgccgcttttggccgccgccttcggcatcgaatagtcgatctcggccgtcggaacgagtccgccgacgctgactccggtcaccaccgcactcgaactgttggagaccacgatcgtcagctgcgacatcacatggtagaaaatcatgccgacaggcgccgaaacgggcgtaacatcggttttcacggccgccagcaggtcggacggcccgttgccctgcgtctggtccgaggagacggtgaattcgtcgggtcttccgccttcggcatagggataataggccgtcaatacggacttttcattcaggtcgttgtaccacgacagcccggacgccgtaaaagccgtgccgtcgtaggtcatcggcacgttctcggcgtacggggcactccctttggagatcgtcagaccgatacggtcgccggtatcgaaatgcagacccgtgacgcgcgtacggatagccggagcgatcttcacgcaaagcgtacctttctcggactccgcgcagccggccgcaataaggaccgccagagccatgaacaaaatctttctcatctcttgataatcgtaaaaagtgacttttcagtacaaaaataaacctttttacgttattaccaagtgtttccgctaatttttgtaataggattcgtcgagtccgagaatgaaatcgtcccggcggcggaacgtgacgagcgtgagcgccagcaccagcgccgcattgaagaaaaacgggaaacggtcgctgtgggttccgaacagatgccggaaaaggtccacgataaagggacagaccatcacggccagatagttcatcgccatcacgaacgacagcgccagcgtcgccgagcgcggcggagcgatcgtcgccgccttgtcgtaaatgacgggctggatcacgccgtagccgaagcccgcgcacaaaaccccgacgacgagcatcgtcttgtcgcggaaaatacccacgcagagcagcccggcgcagatcaatgcgagcgagacgagattgacgctgcgcgtcagccgccggataatcttgtcgatgaagagtcccggcaccatgatcgccagaaagaaaagcgagatcagcacgccggagaacgagctgtctatcttgtagtcgtcgacaagaaacgaggcgtagaacgtcacgaccagcacggcgtaggtggcgaaaaaatagaacagcatcagcccgacgagcttgcggcggtcaatcatcttatggcgcatctggatgctctgctccggttcgggagtggagcgtccgcgcctgaggaaaaacgacagggccagcgagacgcccggcagggtatagaccagaaagggcagatgccagttcacatcggccagatagccggcgacgacggtggccagcacgagggtcaggttgttgatcgccgaactgtagcccagctggcgcacgcggtaatcgcccgtgaaataatcgaccacgagtcccgtcgaaagcggaatcaccatgcctgcgccgatgccgagaatacagctgatgacgatcagccacgccatgctcttggcaaaaatgcaggcgacgccgctcaggaagaagaccgcaagtccgacggtgagaatccggagtttgtccctgcccacggagaggcgtcccgaaagcagcacgaaggggatgataagcagcgacggaagcgaggtcagcatctgaatttcgaggtcggtggctttgggaaatatccggttcagatcccccagaatcggagatatggcaagtcccggcagcgaggcgatcgccgacacggaccagatcgccagcaataccgtaagcgtgatcgtaccttttcctgttttgattttcattgcccggcagtttaccgcccgacaccgcaactgttataccaaacaacaacaggccggcatgctgccggcccgttgtcttgtcttgcatatcggtcgtctacagattcttcaccttcacgcagcgcacctgcatgccgttggcgcgggcatacgcttcggcaggcgcgatgccgcccgtcccggtgagcttctcgtaccagaaatgaagcgcgtgcgactgcgtgccgttcacggcggtagtccagtaaagtccctcccaaggctgcgcgatatccgcacgggtatacaacttcatcttcgcttcatccttcggaatataaatattctgaatcttgccgtcgtcgtagcggcggcgtccgccgcccatgaagaacgattcggcttttccgtcggtcagcgtccagccgaatttctcctcgtcgcccgcggcgggagttccgacgatctcaagcccggcaaaagcggccgaaggagcgacgcgccagccgtaggggcaggggtcgttcacgctctttgcgccggcatcgccgtccgacgaccagccggcatcggacttgctccagagccagtcgttattcgactcggcgacgcccgtaacaaaggtaagcgggtgtttgacggcataatccatcgttccggtctcggcactcgacgcgaccatcgtcacataggtgcggctgccgctgtcgttgtacatcgcggcgccctgaccgctggagatcttataggtgctcggcccgatgaacggatccttgcggccccactggtaataaagaccgtaggaggccagtatctcggacgtcgtcgcattgccgttggccagcgcgcccagattgcgggtcatcatcgtatagccgttcagctcgaccgaaccgttttcgccttcgggatcataatccgtcgcccagacatgccagctccagatcagttcgtcgttggcatcgtaagcgccgatcacggcgttgcccttgagaatcttgttgctgtcttcggtgtcggctccgatgtagaacgacgccttgccgttctccatctgcagatactgcaccagtcccgacgcagatttccagataacgcccagatgatccgtcgccagcggcgaaccgtcgcctttgtgcatgacgtcgaacaggtagttggtctctttcacggatgccatataactgttggccacgcccgccgcgctcaggtccacggtctttacgacgccgacgaaaagcacgcccgaaacgctcgtcccgcccggagtgaccccggccagcacgaccgtacccgattcgacggccgtacccttttcgagtgccgtggccgaaggagctatgaccgtaagcatgcccgtggtttggtcgagcatcggctcgtcccagcccgtgggctggctcgtaacggagagcgtcttgatgttccgcagggtgaagcccactgtagccatgccgctcggcgcgtcgatgaagaccgcaggtttgtcgaacgatacggcgcccgaatccttgtccttactgcacgacacggcaaacgccgccgcagtcacgaccacggctatcagttttacgaatcctttcatattgcccaaatttactttatgtcagtttaaaaaatctctgcaaagataccaaaaagcgggataaatcctataaaggcatcccaaatatttcatccgtcgggatttgggaataattattgccgcctacacccaaacgaaatataaactcaaatagtatgtccaacatgtccaatttgaaaattgaaacgggaagctcccccgcagaggagcggttcagcatcaccgtaaccgaaactggcccctatctggtatacgggcggccgccgctggccgaacagttcatcatgcccgacgagtccaacgacagctggtattttcaggagggcaggcacttctcgaccgaatcggaacccacggcgctatgccgctgcggagcctcccgccgcaagccctactgtgacggcagccatgaaaaagccagctgggatccgcgactcacggcgcagcgggatgcgctgctcgacaatgccgaagtgatcgacggcggcacgcttcagatgacggacaacgaaaaatactgcgtcttcgcacgcttctgccacccgcatggcgacgcatggtcgctcaccgagcagtcggacgatcccgaagcgcgcaggctggccgtccgcgaagcttcgatgtgtcccagcggccgtctcatggcatgggacaaagagacgatgaaaccctacgaattccggttcgaaccgagtctcggcctgatcgaagacattacgatcggcgccagcggcggtttgtggatacgcggcggcattcccatgcggcgcgaaaacgggcagacgtacgaaatccgcaaccgcgtcgtcgcatgccgctgcggacagtcggccaacaagccttactgcgacggcacgcatgccgcaatcaagtggcgggacgaactcaacggcgaaccggtcggcgaaacgctccccgaagaggtgtactgaaccggcggcgacgggacggaggcttccgcgccgtagcgcccccggcatccgaaacgggaaatccggcgcccggctccggcgttatccggcagggccgcctgcgatcccgccacaacatcttccacgatacggaaagagaggaccgtccgggacggtcctctcttcgtatttcaatccggcacaatcccggaaacgcagattcccgcaggctttccggccttgcgggaatccggagttctgtcatttgcagagaaagtcgatataatcgacaatagccttgctgcagaccggacagagctcgtccgttttgtgcaggttgttcatcaggcagttccgccacgggcggtagacaccctcggcggcatacccgccgccttcgaaaacgcccacgacaccgtcgtactcctccgtgtcgggcgtcggcacgggagttccctccgccaccatccggctccagaatttatccccgaacccgacgagcgtcgtcaggttgggttcccacggttcgatacttttcgcgtacatgtcgtcataggaggtcgtgccgacatattcgtcgcccagccccagcagcagatggccgaactcgtggacatggatttttccggtgcgcgtggggtggtgcgcggcgctgatgccgtaaaagttgaaaatcccgccgccaccgtatttctgtgtgttcgaaagcacatagatataatcgtaaggcacatgcgccgccatgtcgcgcagacgctggaaatcggtcaccatctggtagcgttccgaatcgaaggtatagaaactcgcgccgcaggccgtattgcgccagacgttttcaccggggatggtcacgcccgaatcgtcggagggagcccacacggcgcggacgttgaagcgcgcggcgttctccttatagggcgaatagctgaaaaattcgtcggcgaacgtgcggcaggccgactcgaatttggcccgctcgccggccccgtagccctcaggcagcaggacgatgtccacacgctgcgccgaattgccggaatacatcacctcgaacgtctcgcagcggggcgtgaaccgctcgataaaataggaatcggggtcgatattctggctgaaacgcttctcgaaacgccctttgccgttgcgggtgaaaatctcgatccggcacggacgtttgggataggggaataccaccgattcgggataggagcggcgcacgctgtcggcttcgggcgtactctgccactcgttgaaaagcgtgcagaagccgcgggaatagatctcccggcccgacgcccggtccacgatacggaaaaactggttgccgtatccggtcgtatcaaccagcgagaccttagaccctgcccagtaaggctcctccttcagcgcgtcgaagaaatactcctccgagcggctgtctccggcgtgatagtagtcgaagcgcatcgttttgtcgaaaaaacagtcggcgaacggcgtctgcgcagcggcggagacgccggctccgagaaacagcaaaataaaaatcttcttcatggttcgcagcatttcagggcgacaaaaaaggggtacgcacagacgtacccccgaatcggcccgttacgggttatttcttctccggccgtgcgatcgtctcgcgcatcgtcgtgtcggccatgatgtttttcattttgtagtaatccatgatccccagattgccgttgcggaacgcttcggccatggccagcggcacctcggcttcggcgagaatcaccttggcgcgggcgtcctgcgccttggccttgttctcctgttccaaggcgacggccatggcgcggcgctcctcggccttggcctgcgcgatgttcttgtcggcctgcgcctgatccatctgcagctgggcgccgatgttcttgcccacgtcgatatcggcgatgtcgatcgaaaggatttcgaacgccgtgccggcgtcgagtcccttttcgagcaccacgcgggaaatcgaatcgggattctccagcacgatcttatgcgaagccgccgaaccgatcgacgagacgataccctcgcccacacgcgccaacacggtttcctcaccggcgccgccgaccagctgtttgatattggcgcgcaccgtaacgcgggccttggcgatcagctggatgccgtccttggcgacggccgctacgggcggggtgttgatgaccttggggttcaccgacatctgcacggcttcgaacacgtcgcggcccgcgaggtcgatggccgtggccatcttgaagtcgagcatgatgttggctttctgggccgataccagtgcatgcacgacgctggtgacgttgccgcccgcaaggtaatgggcctccagttcgttgggatcgagactcaggccggctttcgtgctctcgatcatcgaagagacgatcgtcgagggcggcaccttgcgccagcgcatcaggataagctgcagcaggctgatcctcacgcccgacaccaacgccgagaaccagagtcctacgggtataaaatagaagatgagccagatcgcaaagaggctcacgaaaattataagaacgatcaatccaccctgaaaatccatagttttttgtttttatttggttgtttttacgatgacgctgaaattctcgaacccgacgacttcgatctccttccgggggtccacataggcgcccaaggatttggcctcataagtccgtccgttcacctcgatcttgcccatcggcgaaaggcgcgagagggtcgtgccgcggtcgccgacgctcagctcctgttcgggcagggtaggcatgctcgacgaattgattttctgtttgagcgagaagcgctgccacgtcttggcgcgcagcgaaacgacggtggcgatcagcgacaacaccagaataaccagcacgaccaccgaaccggccacggggccgagatcgcggaatgcgaggtagatcgaactgccgtagcagaccagcgccagaatcgcgccgatcgacacgcccggcagcaggaccagctccgccaccagaaagagcaggccgaaaaagatgaggagtacaatatagaacatcgtcatagggaagttgttgaatattggactaaagataggaattaaaatcaattattccgcaatttcagcgacttttatttccaaagccgggtcggtctgcgtcaccgcggccgccacgcggtcggccacggccttgtcgtcgaacgtcccgacgacgaagagctgctgtcccacgcgcgaaagctcgcacccctcggccgtatccgtaatcgccgccttcaccgcgtcggaaagcgcttcggagctgacgatctcgacccggtaggcgatatgctgcgcttcggggtccttcgaaagattgcggtactcgccgtcggtccacacgacgatttcggggcggacgaaaccgcgggccttcagcagcttttgggccgcttcggcctcctccctcgtggcgaaacctccggcgtagtaacaccatttcctgtcatcgttgaccagataggagagcgggtaagcgccccggaaggtcgatacggcgcgcttggtattgaacgtgccgagcaggatgcggtatatcgtcccgtgctcgtagaccttgcattcgggaatggggtgctgatagctgtacttcggcgtcgaggagaaggaaacgctgtcgtaatcgaggaaataacgctctgcgacgtcgatccggggcagccggaagtcgatgccctccagctgcgccgtcacgccacgcagcgaatcgcgcgcggaggtcagccccagcatatcggccacggaggtttcatacccgacgagcaccttcttgcgcaggaaatagtcggtcacggcgtccgaagcggtctcgccgcgcagttccgagagctgacgggcggcctccgagagccgctcctcctcgcgggaaagaatctcgtcccgccccagcttgtccatcaggtagccgtaagcatagctcttgttgtcgaagatgtagttccatgcgtcggagagcgaatcggccagcacgcggttgaagccctgcagagtcttgtatttgtcgtaaatctccgccgcatcggcttcggcctgagccgcggcgtaggcttcggccagctcggaaatcgtgccgtaattggcaaaatagcggttcacgtaatccacggcatcgaattccagccgctgcgcttcgacgagcgcggcatagtcggcctccgggagctgttcccggaaatagggattgctgaccagattgcgcaccttgagcgaatcgggaatctccgccgccggattttccgcggcaggccccgccggctgcgacgccgcgccgttcaggttggcgagcacccactcctgctcgatggtgttgatacggtcgatcaggcggcccttagcattgcggatttcgaatatccggctttcgagctgcagaatatcctgcgaatactgctggcgggccgccgggttctcgcgcagctgccgccgggcgcgttccacggcattgacgatcgaatcttcgcgcatctgcagctgcgcatcctcgcgcagaagcgacatatactcctcgttgctttcgagccccgcgatgcgggcttcgactgaaagctgctgcgcacgcaggcttccggcgcccagaagcgccgcgaacagaaacaatatgcaagttttacgaaccaacattccggttacctccaccatttaatgaaaaagagttgtataagcccgaaaatctccagacgccccagaagcatcagcagcgaactggatatcttgaaaacgcccggcacggacgaaaaattatccatcgccccgacttggccgaatccgggaccgacattgccgatcgaagccaccgagccggagaagctggtcatcagatcgacgccgaacatcgtccccagcaccgtgccggcgagaatcagcatcaggtatgcgacgataaatatcatgaccgaatggagcgcttcgttctcctgaatgaccccgtccagcttgatgcggatgatcgcgttggggtgctgctgctggcgcaggcgcgtgcgcatcatcttcatcgccagcaccagccggttggtcttgatgccgcccgcggtggaacccgcgcaggcacacacgatcgaaccgaaaatcagcaggataaccgcaaacgacgtccattggttggagtcggccgtggcgaatcccgtcgtcgtaacaagcgacacgaactggaaaagcgcatgatggaacgcggccgaaaacgtagggtatatgttggcggcgaagagactgacggcgatcagcaggccgccgcccagcagcatgacgaggtaccagcgcgtcacctccgaacggaatatgttgttgcgtttgccggtcaccgtcgcatagatcagtccgaagtggatacccgccgtagccatggcgaagatcaggatcgtatcgatcatcggactgttgaaataggcgatgctggcgttcttggtcgagaaaccgctcgtggcgcacgccgacatggcgtggcagagcgaatcgaaccagttcatgcccgccattttgagcagcaccgtcgtcagcaccgtaagccccacatagactaccagcagtatctgcacgatgatctgggtccggtagcggtaattatccttggccaaggtcgaaagctcgacgctcgacagcgtcatcttgttgcgccccagcgaggggaggatcagcagggcgaacatgactacgcccatacccccgatccacgtcgaggacatgcgccagaactgcagcccccgcggcagcacctcgatatcgttcaggatcgtcgatccggtcgtcgtaaagcccgaaacgctttcgaaccaagcgttcaccagactgaactccccgccccagatcaggtaggggaacatgccgaccagacaggcgaccagccacgagccgaccacgatgcagaatccctccttgttggtgatctgctgcgtacgttcgacgaagatcagcggaaacgcccccaagagggccgtgagcagcgacgcgagcagcaggggatagaacgccgaatccatgccgctgacaaaggaaatccccgccgacaacagcatgaacagcgcaatgaaaagcatcacgaccccgacatatcgcaaaaccacgtctactcgcatcgcaatcaggattttggctgcttggaaacggttatcagggtctcgatcttctccttcagctccaagacctcgtccttgcagtcggccttgacggcgaacggcacgcggaacgagaggtagtcgcccagccccttgttcatccggatgatggggttgacgcagtagaccgacatgaagtagtagagcatcagcacgatggcgatcatcaccacgagcgagatcagcaccggcgtaacggcccggtaggcgtttttcttcatctgctcggcacgcggagccagcgaactctgcgtcgaagtcatatagttcttgatggcagcggtcagacggccgtagaggacttcgtattcgctgtcataccagctgcggcccaccgaatcgggcgcggccggattcgccgcggcatgcgctccgaaagcgaggtagttgtcggtcagcaggcgcagctcggtcgtcgcgaaagccagcgagtcgagaaacgacttgtcgagggcttcgctctgggccacgagcagcgtgttctcaagccgctccatactcgaccggcaaaggctgtcgtaggagttgtctccgaacaccgaaaggcggataagcgccacgttctgctcataggcggcgtcgagcatctccttggccagctcgatattacgcttgttggccttcaggatttcgcccgtatcgcggctcaggtggctcagttccacgaacgagaccatccccgaaaaaaacagcaggcagacgatactcaaaaaaccgatcgtcactcttctgcgcatacccgtcatacttcttttgattttatcaatgcaaatatagtgaattaatcgagaatatcacccatcagatcgtgagattcgtccatcgccccgaagcgcacccggcaaatggcgttgatgcgcgtccggtcgtagggggccttcacccggcggtagctgcccgtatagccgaacatcatgccgccgcgcagggtgctttcgaacagcacggtatcctcggagccgacggctttggcgcagaatgcgccgtgcagccgcccgcaaagttcttccagttcggcgacgcggcgcgtcgccaccgacggctgcaccttgccgggcatatcgacggcaggcgttccgggacgctccgaaaaaggaaatatgtgaaggaaagcgggcttgagtccctccagaaaatcgtacgtcgtgcggaaatcctcctcggtttcgccgggaaagccgacgatgacgtcgatgccgatgaaggcgtcgggcatcagcgcccgcacggcggcgatgcggtcggcgaaacgcgccgtggtatagcggcggcgcatcagtccgagaattttgtccgagccgctctggagcggaatatggaagtgatgctggaatttaggtgacgcggcgcaaaacgctatgatttcgtccgttagaagattaggttcgatggacgaaatccggtagcgttcgatgccttcgacttcgttgagcgcacgcagcaggtcgatgaaacgctcgcccgtcgtacggccgaaatcccccgtgttgattcccgtgatgacgatctccttctgtccggccgcggcgatctggcgggcttcggcgacgaggtccgcgatcggcatattgcggctgccgccgcgggcatagtggatcgtacagtaggcgcacttgtagtcgcagccgtcctgcaccttgaggaaagcgcgcgtgcggtcgccgctcgaaaaggccgcaaagaacgaagtgagcgattcggtatcgcaactgtagatctgcgcacggcccttgccggagagttcgaccacccgtttatataacattcctttatcattattgctcagcacgatatcaacaccttcgattgccgctatttcctgcggtttgagctgcgcgtaacagcccgtcacggcgatgatggcaccgggattgcggcggtggagtttgcggatcaggttgcggcatttcttgtcggcgtgttccgtgaccgaacagctgttgatgacgcatatgtcggcctcggcgtcgggtgcgacgcgcacgaaaccgccgcgctcgaactcccgcgcgagggtcgagctttccgaaaagttgagtttgcagccgagggtgtggaaatttactctgcgttgttgcataaattgtcgttatttaccgggcgaaattacgaaaactgtgcgaaaagggagggcttttccgagaaaaaagcgtaaatttgcgcgcaatataaggagcgaggcatggaatttttcagcgacctgattcaatacggctacttgtcgaacgcgctggcggcgtgtgtcctttcgggcataacgtgcggcgtgataggcacctatgtcgtatgccgccggatggttttcctcgccggaggcatcacgcattcctcgttcggcggactgggcatcgcgttttacctcggcaccgacccgatcgccggggcgatgatcttcgccgtactctcggcgctgggcatcgaatgggccggcagcaggggccgcatccgcgaagattcggccatcggcatcatctggtcggtgggcatggccgtcggcgcgctcttcatgagcctgcggccgggctacacgtcgggcgatctctccgcatacctgttcggcagcatcgtcaccgtgacacacggcgacgtcgcggcgctgaccgctctgacgctgttcatcatcgccggagcgctgctatggctgcggccggtgatgtacgtggccttcgaccgcgatttcgcccgcagccggggcattccgacccgcgtgatctcctacgtgatggcggcgctgatcgccgtgacgatcgtcctctcgatccgcatcatgggaatcgtcctgctgatttcgctgctcacgatgcccgttgccatagtcaattcgctctcgcgctcgtaccggaccatcgcgctctgcgcgccgctggtcgccgtggcgggcaacgtcgccggactcgtcgcaagctacaatttcgaagttccgcccggagcagccataatatttacactcacccttacgcttattgtagtaaaactattacctttgcgtaacaaaaaagccggtgccgccgcatgaaaaccatccataaactcgtactgaaagcctacttggggccgatggtcctcacgtttttcatcgtgatgttcgtcctgatgatgaacatcgtgtggcgttacatcgacgagctggtgggcaaaggactcagcgcaggcatcatcatcgagctgatgacctacttcatggccaacatgatcccgctgggactgccgctggccatgctgctggcggccatcatgaccatgggcaatctgggagagaactacgagctgctggccatgaagtcggccggcatgtcgctcatacgcatcaccaagccgctgattattctggtaagcctgatctccgtgggcagcttcttcatcggcaacaacctcgtgccgtacgccaacaaaaaggtgttcagcatcctgtacgacatccgccagcagaaacagagtctcgaatttcaggacggactgttcttcaacggcatcgacaacatgtcgatccgcgtcagcaggcaggaacccgaaacgcatctgctgcacgacgtgctgatatacgacaaccgcgcggccaacggcgacatgaacaccatcgtggccgattcgggatacatccgtctttcggacgacaagaaatacctgctggtgacgcttttcaacggcgagacctacgagcagacccgcagcagccagtggttcacccagagcaaactgcgccaccatatcttcgaaaagcaggatcaggtgatcccgatggagggcttcgcgatgggccgcaccgacgccaaccagttttcgaacagccagacgaagaatatcaacgagctgcagcacgacatcgactcgctcgaaaaaatggtgaacagcgcgacgacgcgctcgtacgaaccgctgctcaaggagcagattttctcccgcgacaactcggtgctcccgcagcccgacagtctccgcatcgacaagagccggttccgcgacatggcgacgatggactccatcgctacgctgcagatgcgggaaaaggagcgcgtatggaatcaggcgcgcacgctggccaagaactcccgcaacatgttctcgttcgacgagtcggcggcaaaagaggcgctcaaccagctctaccgcagcaaagtcgaatggcacaagaagatgtcgctgccggtgtcgatcatgatcttcttcctgatcggcgcaccgctcggcgccatcatccgcaagggcggactgggacttccggtcgtcgtgtcgatcatcttcttcgtgatctactacatcatcagcctgtcaggcgagaaactggccaaggaggggagctgggacgccgtatacggcatgtggctctcgacgttcatcctcacgcccatagcgatctacctgacctacaaggccacgaacgactcggcgctgctcgacacggactggtacgccggaaaattcaaggcgctctacgaacgcatgcgacccgcgatcaacaaattgaaaaacgctataaaactcaaacgaaatggcaaaaagcacgattctgaatagtgtggaagaggttatcgaagatttccgcaacggcaaaatagtgatcgtcgtcgatgacgaagaccgcgaaaacgaaggcgacttcatcgtagcggcggagaaaataacccccgaaatcgtgaatttcatgctcaaggagggccgcggcgtactctgcgcaccgctttcggaggaccgctgcgccgaactcggcctcaacatgatggaggagaacaacacctcgctgctggggactccctttacagtgaccgtcgatctgctgggccacgactgcacaacgggcgtctcgatccacgaccgtgcggcgacgatccgcgcgctggccgacccggccacgcgggccacggacttgggccgtccgggacatatcaaccccctgcgcgcacgccagaaaggcgtactccgccgtccgggacataccgaagcggcgatcgaccttgcgcggctggcaggcttgcagcccgcgggtgcgctgatcgaaatcatgaacgaagacggcacgatggcccgtctgccgcagctgatcgagatcgccaagaaattcgacctcaaaatcatctcgatcgcgtcgctgatctcataccggctgaaggaggaatccatcgtcgagaagggcgaaaccgtggacctgccgaccgcatggggcgatttccgcatcacgccgttccgccagaagagcaacgggctggagcatgtggcgctgaccaaaggcgaatggaccgaggacgaaccggtgctgacccgcgtacactcgtcatgcgccacgggcgacatcttcggctcgtgccgctgcgactgcggcgaccagctgcacgaagcgatgcgcatgatcgaaaaggagggtaagggcgcgatcatctacctccagcaggaggggcgcggcatcggactctgcaacaaaatcaaggcatacaagcttcaggacgagggactggacaccgtggacgccaacgtgcagctgggcttcggcgtggacgagcgcgactacggcatcggcgcgagcatcatccgcgaaatgggcatcaagcacatgcggctgatgaccaacaacccgctcaaaagggccgggctggagggctacggactgcggatcgacgagatcgtgccggtggtcatcgcccccaacgagcacaacctgcgctacctgaagacgaaggaggagcgcatgcaccacacgctcggactggacaagaaataacccggctcagaaggcccgcattccaaatataacacacgaagaagaatgaatccgaaagagctgcgcatcgtatttatgggtacgcccgaattcgccgtaccgtcgctccgggcgctggtcgccgggggctacaacgtcgtggccgtggtcacgacgcccgacaaacccgccggacggggccagaaactgcatcagagcgaggtcaagctggccgcgctcgaactgggacttccggtattgcagcccgaaaagctgaaagcgccggagttcgtcgaagccatgcaggcgctgaaacccgatctggggatcgtcatcgcgttccgcatgcttcccgaagtgatctgggccatgccgcggctgggaacgttcaacctgcacgcctcgctgcttccgcagtaccgcggggctgcgccgatcaactgggccgtcatcaacggcgaaaccgagaccggcgtcacaacgttcctgctcaaccacgaaatagacaaaggcgcgatcatcgcgcaggtgcgcgtgccgattcttccgaaagacaacgtgggcacgatgtacgacaaactgatgcacaccggaacggcgctcgtgaccgagaccgtggaccgcatcgccgcaggggatgtccagcccatggagcagacgggaatcgacgagagccgcctgcatcctgcgcccaaaatcttcaaggaagactgccggatcgactggtcgtgggagggacggcggatcgtgaacttcgtgcgcgggctttcgccctatccggccgcatggaccgaaatgcgcaaagagggcgaaacggcatccctcacggcgaaaatttatgcggcggcgttcgaagcggcggcgcacaacgaagcggcaggagccgtcgaaagcgacggacgcacctttatccgcgtggcatgcgccgacgggtggatcaccctcggcgagttgcagatagccggtaaaaaacggcttccggtgcgcgagctgctgctcggactgcgggagatcggacagtaccggtttcagaaataacctcatccggcgatcggcaggaatatatcaataaaaaaggggcttgcgcaagcccctttcgattatcctttgatttcgtatcctttgccgagtttcttttcgatctcttccttcggcagcgggcgcgtgcagaagaaccagtcatagcacttcacgccttcaggctggtcgttcatgtcctcgcccttcatcggaacgatcacctcgtcgcccggacgccaatcggccggcatcgccacgccgaacgcgtcgatggcctgcaggcccaccagcacgcgcttgatttcgtcgaaattgcggcccagcgccagcggataatagatcatcgcccgcagcacgcccttgggatcgacgaagaacacggcgcgcacggcagcggtctggctttcgccgggctggatcatgccgtagagattggcaaccttcatcgacacgtcgtcgataatcggaaattccacctttatatccttcatgcccttgtattcgatcttttcgcggatcgtgcgcagccacgcgatatggctgttgcggctgtccaccgaaagaccgatcagctcgcagttcagcgccttgaactccgcagtgcgggcgccgaaagtaagcacctccgaggtgcagataggcgtgaaatcggcagggtggctgaaaagaatcacccatttgcctttgtaatcggccgggaagctgaccttcccctgcgtcgtcatcgcttcgaatgccggaacgggttcgcccagacgcggcatttgctgttcgttcttgtccataactgaatgatttaatgtatatgtccggacatgcaaaatcaatgccccgcatccgcaaattcttcgtcgtacgctaagataataattttaagaatatgttattcaccgatttacgttcctgtacggatcggtctacacaaacggcggattcgcttacgaccgcaaaaggcaaccaatacgtccggtccgaaaaatgcgaaaaagcggcattcggagacttcactttttgaaattattcgtatatttgttcgaataactctaaaaagcgttgcctatggatatatagtaatgattaacttatcgaaacacacgtaccgtctccgcactaaaagcgccggtacatacatataaaaagcgttagctttatttcttgcttatcgaaacttcgacaatttcagagcagacaagagtaaagtgtaaacgctcacgttccaacgtgggctttactcatttatttgtctgcaaggtagtcgaagacctcgataagcaaataaaagtttagcctgcgttttttatatgcctctctctttttttcaaacttctaattttgtattatggcaacttggattatcaaaacattgttcgacattcttttacccgatggcaccaaaatatcaaaaggaaccggggtcaatattgttgggaatcatattaatcccatgttcactaatgccggaagagaagccgtcaaagaagcttttaagcgccaatacggtgttgacattccctcgcataaaattaatagtggaaacatgaaatagcaaaaacgggaaacatttttgtttcccgtttttcaatcaataccataatagcatcatcgcaccttgcggatgatctcgccgccgtggcggatggcctcctcgttggccgggagcatcttccacgcacgttcgggaagcgactttttcaacccgaccatcacattctccatctcgaccacggggcgcactttcagatacccgcccaggatcatcgtgttgaacagcttggcctggcccatcttcgcgcactcggccgtggcgtcgatcgagtaaacctcgatgtcggtacgcacggggtggcgcgtgatgccgttggtatcgtagatcagcacgccgcccggctttaccatcggttcgaatttctccatcgactgctgattcaggatgatcgccgtatcgaattcatgggcgataggcgacgaaatcttccggtccgaaaggatcaccgtcacgttggccgtgccgccgcgcatttcgggaccgtaagagggcatccacgtaacttcgaaatcctgcatgacgcccgaataggccagtatcttgcccatcgagaggacgccctgtcctccgaatcctgcgataattaaagtctctttcatatcggtcctcttattttacgtccttgatatcgcccagcggatagaagggcagcatgttctgctcaagccactcgttcgacgcgacgggcgaaagtttccagccgctgttgcaggtcgaaacgacctcgaccagcgagaagcctttgccggccatcgaattctcgaacgccttgcggatcgccttcttgcacttgcgcacgttagccggcgtatgcacgctctgacgcgtgataaaggtagcgccgtcgaggtgggccatcatctcggcgatcttgtagggatagccgttcagacgcggatcgcggccgtagggggtcgtcgcggtcttcatgcccagcagggtagtcggagccatctggccgcccgtcatgccgtagatggcgttgttgatgtagaccgccacgacattctcgccgcgggcggccgcatggatcgactccgcggtaccgatggccgacaggtcgccgtcgccctgataggtgaagaccagattgccgggatgcagccgtttgacggccgtagcgacggccagcgcgcgtccatgcgccgcttcgatccagtcgatgtcgatgtaattgtatgcgaatacggagcagcccacgggcgaaacgcccacggtcttctcttcgagacccatctcttcgatgacctccgcaatcagtttgtgtaccgtaccgtgactacagccggggcagtagtgcatgacgttgtcggtaatgagcttcggtttgacataaaccagattctcctttttgatttcaacctctgccatagtctttactttttaatcagtttttccttgagtgcggcaagcacctcgtcgggggcgaacatcataccgccctgacggccgaaatgctcgacgggagccgcgccgttcacggccagccgaacgtcctcgaccatctgacccgcattcagctcggcggagaggaagcccttcacgccgcgcgcggccagttcggcaagcggcttcttggggaaagggtagagggtgatcggacgcagcaggccgaccttgagtccttcggcgcgcgccatctcgaccgtggccgagcagatgcgggccgacgagccgaacgccacgatgacgtaatcggcatcgtcgcagtcgatcgcttcgtagcgcacctcgttctcttcgagggccttgtatttctcctgaaggcgtttgttgatgatctccatcttctcggactgcagttccagcgatgtcacgatattgcgctgacggtcggcgggtttgccgtaggtcgcccacgacttgcactcggcggcgatctcctcgtcggtcttgcggggacgctgcggcgcgagcaccactttctccatcatctgtccgatggcgccgtcggccaaaatcagcgccggattgcggtacttgaacgccagatcgaacgcgacggccacgtggtcgtgcatctcctgcacggaattgggcgccagcacgatcaggtggaagtcgccgtgaccgccgcccttgcaggcttggaaatagtcgccctgcgaaggctggatggtgcccagccccggaccgccgcgctggcagttgataatcaggcagggcagctcggcgcccgccagatagctaagcccctcggacatcaggctgacgccggggctagacgaggaggtcatcacccgtttgccggtcgatgcgccgccgtagaccatgttgatcgacgagatctccgattcggcctgcagcacgaccatgcccgtggtttcccacggtttgagttccatcagcgtctccatcacctccgactggggcgtgatcgggtagccgaaatatccgtcgcaaccgtaacggatcgccgcatgggcgatcacttcgttgcctttcatcagttttacctctttctctgccatagcttactcgattttttgacgataaaccgtgatgacgctgtccgggcaaatcaccgcgcacgaagcgcagcctatgcaggcgtcgggatttgccatccgggccacggggtagcccttgctgttcacctcagccgacatgcccagcacattgcacggacacgaagcgacgcacactccgcatcctttgcagcgttccttatcgacaacgactgttccttttattttagccataagccgtagttttgttaagttccttacaaatatataaaaaaatcccgaagattctaaacgaatgcaacaaatcttatcacgaaaaacggataagtgaaagcagtgcggccggaatccagcatcccgaacgctctgcacacaaaacatttcggaggttttattccgccttgggatcgggtccgtatttattttcgcccctatggccgccgatgcagaaccagacgaggaaaaagaggctccacacggaaaagaccagcattactgcaagatagcgattccggcgcatccgcaaaaaaaagacagcccgaaaaggctgtctttcaatcgaacgcggacggcggctactcctcgaaggagtggatcaccacgccggagcggagtttcggctcgaaccacgtcgtcttcggaggcatgatgttgcccgtgtcggcgatgttgatgagctgctgcatcgagacgggatagagggcgaaagccgccttcatctcgccgctgtccacgcggcgtttcagctcgcccagaccgcgaatgccgcccacgaagtcgatccgcttcgaagtgcgcaggtctttgatgtccagaatccggtccagcaccagattcgacagcaccgtgacgtccagcaccccgatcgggtcgttgtcgtcgtaagtgccgggcttggccgtcaggctgtaccaacggccgtcgaggtacatcgagaagttatgcagtcccgaagggcggtactcttcggcgcccttgtcctcgacggtgaagttttcggccagcttttcgagcagctgggcggaggtcagaccgttcaggtccttcaccacgcggttgtagtcgatgatgcgtagctggcccgcggggaaggtcacggcaaggaagtagcagtactcctcacaacccgtatggtcgggattcctgcgctggcactcctgtcccacacgcgccgcggcggccgtgcggtgatggccgtcggcgacgtacagcgccggaatatccttgaaaatctccgtaatacggttgttggtcttcctgtcgcgaatcacccacaacttatgtccgaagccgtcggcggccgtaaaatcgtactcaggagcgttgttttccaccacgccggccacgatggcgtcgatctcggcgttgtcgggataggcgaaaaacaccggttcgatattggctttctggttgcggacgtggatcatgcggtcctcctccttgtcggggcgcgtcagttcgtgcttcttgatcgcgcccgaaaggtaatcctcgtagttgcagcacatcgtcagaccatactgcgtacggccgtccatcgtctgcgcatagatataatagtactcttcgggatcctgttcgagccagcccttttcgcgccatgcgcggaagttttcgacggccttgtcgtaaacctcctgcgaatgttcgtccgcaatggggtcgaagtcgatttcgggcttgatgatgtgcagcagcgaacgctcggtggcttcggccttcgcctcggcggagttcagcacgtcgtagggacgcgacgccacctcggaagcgtactgtttcggggggcgtattccccggaaaggtttgattcttaccatatgttatgattcatatgttatacactatttgttcacctgaaaccgggtattgccgttcttgaagaagtccacgatctgattcgcggcggcaaggccggcgttgatgttggcttcggcggtctcggcgcccatcttcttcgccgtggcgaacacccgcctgccgaatttttcgttcagctcggactggatgccggcggcgatgtcggtaatgtatttcaggtcttcgcgttcggtcagggccttcatcactccctgctcgtcaatcacctccttgcgggcggtattgaccagcgtcgcgcccttgggcatcgacatcagcaggtcgtagccgatcgagcctttggtctgctccgtcgcggggatatgcagcgagaggtagtccgagttcttatacaattcttcgaccgaattcacttttttcacgccgtcggcctcgaaaacggccgaatcggtgataaaaggatcgtaggcgatcacgttcatgcccatcgccttgcccttgcggcccaccagccggcccacgttgccgtaagcatggataccgagggtcttgccctgaatctcggaacccgtgccgggcgtgaagccgttgcgggccatgaaaatcatcatggcgagcgccagttcggccacggcgttggagttctggcccggagtgttcatcaccacgatgccgcgtgcggtagccgccgcgaggtccacgttgtcgtaaccggcaccggcacgcaccacgatcttgaggttccgcgccgcttcgatgacttcggccgtcaccttgtcgctgcggataatcagcgcatccacgtcggccacggccgagagcagttccgatttgtcggtatatttttcgagcagggccagttcgtatccggcgccttcgacgatctgacggatgccgtctacggccttcttggcaaagggcttttccgtcgcaaccaatattttcatacctgtattttcgattaaatgaataaaatctatgtccgacgccgcacgtttcctcggtgtaaaggtaaaaaaatgcgccatggacggatgttatttcgcgtgtttggcggcgaactcctgcatgcactccacaagcaccctgacgctctcgacgggcagtgcgttgtagcacgaagcgcggaaaccgcccaccagccggtggcccttgatgcccacgatgccgcggctcttggcggcctccatgaattcgggagccagctcctcgtaaccgtcggccatcacgaaacagatgttcatcagcgaacggtcctccttgtccaccgtgccgcggaagagcgggttgcggtcgatctcgtcgtagagcagcgcggccttggcctgattgcggcggtagatttcgggaacgccgccgatcgacttgagccacttgagggtctccttgagcacgtagatcgggaacacgggcggcgtattgaacatcgagccgttctcgacatgggtgcggaacgaaaccatcgtcggcaggtcgcgcacgatcttgtcgagcatatcctcgcggatgatggcgaacgcaacgcccgcaggggcgaggttcttctgcgcgccgccgtagatcatggcgtacttggtcacatcgaccggacgcgaaaggatgtccgacgacatgtcggcgatcaggggaacgggcgaaacgaggtcctcgtggtactcggtgccgtagatcgtattgttggaggtgatatgcacgtaatccagatcggaggggatggcgaaacccttgggaatataggtgaaattgcggtcttcggacgacgccagcaattccacttcgccgtaacgcttggcctccttcatggctttcttcgcccagacgccggtattcacgtaacctgctttcttaccgaggaagttggcgggcacctcgtaaaagaaggtgctggcgccgccgccgatatagaaaatcttgtagttctcaggaatgtcgagcatctcgcggaaaagcgcgtcggcttcggccatcacgtcgtcgaaatccttggtgcggtgcgaaatcgaaagcagcgaaaggcccgacccgttgaaatcgataatcgctttggccgcattttcaagtacttcgtctgcaaggatcgacggtcccgcgttgaaattgtgctttttcataatattctgatgtgaatttagggtttcggaactccattctgttagtttgctaacacaaatataaataaaatattcctgagaatacaacacttgtgcaaaacttgttcaaagaaatttcacccggcgtcccgaacacccggcatttttgaattgtttttattacttttgccgaaacttaacatccgccgcaatggtaaaatcgatgacgggcttcggcaaaggcgaagccgctctgcaaaataaaaagatcacggtagaaatccgctcgctcaactccaaacagctcgacctcggactgcggctgccggccgtataccgccagtcggaatacgaaatacgcaacatcatcgcccgcacgatccagcgcggcaaggtcgatgtcttcgtgaccgtcgagtcgcaggccgtggagacgccggcgcgtataaataaagaggtgttccgcgaatacctgcgccaaatgaccgacacgctggccttcgcgggcatcgacgccgactacgacgccatcgtgcccgtcatcatgcgtctgcccgaagtggtatcgaccgaaacggagagcatatccgacgaggagcatgcggcgctgatcgccgcgacggaagccgccgccgcccggctcgacgcattccgcatgcaggaaggcgccatcctgatcgccgacctgctcggccgcgtggacaggatcgaaagctacaaggaagaggtcgtgcctttcgaaaaggcccgcacggagaccatcaaggcccggattctggacaacctcgaaaagctgcaggccgacgtggaccgcaacaggctggagcaggagatgatcttctacctcgaaaagctcgacatcaccgaagagaaggtccgccttgcgaaccactgcagatacttccgcgaagtggccgcgggcgaagagggcgcaggccgcaaactgggcttcatcgcgcaggaaatgggccgtgagatcaacaccatggggtcgaaggccaacgaatcgaacatccagattctggtagtcaagatgaaggatgagctggaaaagatcaaggaacaggtactgaacatattataatgggcaaggtcgtaatattctccgctccgagcggttcgggaaaaaccaccatcgtacgcgaattgctgaagcgttttccgcagttcgaattttcggtttcggcgaccagccgcgcaccccgcggatgcgaacggcacggctgcgactaccacttcatgacgcacgaagagttcatgcaggccgtggccgaaaaccggttcgtggagtgggaagaggtttacaaaggcacctgctacggcacgctgcgctcggaagttgagcgcatctgggccaaaggcaacatcatcgttttcgacgtggacgtgatcggcggcatcaatctcaagcgtatcttcggcggcgacgcatgctcgatattcgtcatgccgccttcggtcgaggagctgcgccgcaggctcgaaggccgcggcacggatgccccggaggtgatcgaccgccgcgtggcgaaggccgaattcgagctgacgaaagcccccgaattcgatcacatcgtcgtgaacgactcgctcgacgaagccatcgccgagaccacccgcatcatcgacgaattcataaccggccggtcatgaaacgcgtaatgctctatttcgggtcgttcaaccccgtacacaaaggccatatcgccttggccgaatatgtcgtggagcagggattgtgcgacgaagcggtgctcgtcgtctcgccccaaagcccctacaagcgggccgccgaactggcgcccgaaatggaccgcttcgagatggcggaaagggcctgcgccgcatcgcgcctgccggagcggatcaaaccttcggtggtggagtttctgctgcccaaaccctcgtacacaatcgacacgctgcgctatctgaccgagaaccacggcgcggagatggagttttcgatcctgatgggcgccgaccagctcgaacggctcgacggctggaaggagtacgaaaaaatactcgaatacccgatatacgtctatccccgccgcggcgagcaggtcgggcgtttcgccggacgcatcaccgtgctggaggatgctccgctgcaggatttctcctcgacggaggtgcgcggacggatcgagcggggcgaggacgtctcgcagatgctcgacgcgggagtcgcggagtacatccgccgcaaagggctttggagcccggcggcacgcaaggccgcactgacggcgcagatcgccgcggaacccgaaaatacggaactgtacaccgagcgcggcaaactccattaccggctcaacgagtggggcgcggcgctcaacgacttcaaccgcgtgctgcagctggacgacagccacgccgaagcgcggcagtatgcgcagatggtgcaggaaatactggaattcagatacaaagacatatacaacccctgacaatgacacgtttgaagattgccctcatggcgggcggcgattcgcccgaacgggaaatcgcgcttcagagcgccgcgcagatcgaatcggcgctggaccacgaaaaatacgacattacggtcatagacctccaccaccgcgactggcactacacggcccccgacggccgccaatggcaggtggacaagaacgacttctcgctgacggtggagggcgaacgcaaggttttcgactatgcgctgatcatcatccacggcacgcccggcgaggacggcaggctgcagggttatctggacatgatgggcgttccctattcgtcgtgttcgatgacctcttcggtcatcacgttcgacaaagtcaccaccaagcgcaccgtggcgggccgcggcatcaacctcgcccgtgaaattttcctctgcaagggcgagaccgcggacccggacgaagtaatcgccgaattcgggcttccgcttttcatcaagccaaacgccagcggcagttcgttcggcgtgacgaaggtccacacgcgcgacgaggtgctgcccgccgtcgaagcggctttcgcccagagcgacgaagtgctgatcgaagagtgcatcgaaggccgcgaaatgggctgcggcatgatggtggcggggggccgggaatatctgttcccgatcacggagatcgtctccaagaaggacttcttcgactatcaggccaaatacaccgaagggtattcggacgagataaccccggcgcagatcgcacccgaaatcgcggaggagctgcaccgcatgacacgcatcgcctacaaggcgtgccgctgttcgggcgtggtgcgcgtcgatttcatcgtcacgcccgaaggcaaaccctatatgatagagatcaactccattcccggcatgagtgcgggaagcatcgtgcccaagcaggcgaaggccatgggcatgacgctgggggagatgttcgacctcgttatcgccgacacctgccgcaaatgatcgagatagacgacaaaatcgtaagcgccgacctgctgcgcgagtgcttcgcatgcgacatcgcggcctgcaagggcatctgctgcgtcgaaggcaacgccggagcgccgctcgaagcggaagaggtcgatattctcgaacgcgaatacgaagcctacaagccctacatgacgcccgaaggcatcgaagccgtcgagcggcagggcttcatggtcgtggacgaggacggggacctgaccacgccgctggtcgacgacgccgagtgcgcctatacctaccgggagaacggcatcacgctctgcgccgtggaaaaggcgtggctggaggggaagacggcgttccgcaagccgatctcatgccatttatatccgatccggctcatgcggttttcgaacggcacggtagggttgaactaccaccgctggtcggtgtgcgccccggcgcgcgagtgcggacggaaactgggaatcccggtctacaaggcactcagggagccgatcgtgcgacgcttcggtgaggaattttacaaggcgctggaagccgccgaggaacttatcagacaacaatagactgcgtatgaaaaaatactgccttacatgtatggccgccgtagcggcgctcacggccgcggccgccgaaccgcaggccgcggagaaaaccgattcgctgcacgtcgcagccctgtcgcccgaagaggccgcagcggtggattccatcgccgcgctgcgcctgcggctggcgcccaagcagatcgagtcgattttcgataccaacgacgtcgtagtcctcgacacgctcgactcaggcaacgacgcggtgcaggtggtgctctacagcaacaacacatggaaatacgtccgcaaccgcgaagtggccaaggacagcaccatcttcgagaaatactgggacacgaagacgctcttcccctacaaggaggtagacatgtcgtcgatgccccagtcggtggtcatcgacctgatcgactcgctgaccggctaccactgcccgtatcagggctcggtgcatccgcgcggcaagtacggtccgcgccgtcgccgccagcatcagggcgtcgatctgccgctcaagacgggcgatccggtttacgccacattctgcggccgggtgcgaatctcggaatacaacaagggcgggtacggaaatctggtcatcatccgccacgacaacgggctggagacctattacggccatctttcggagcgcatggtcgagccgaaccagtgggtcgaagcgggacagatcatcggtctgggcggctcgacgggacgctcgacgggtccgcatctgcatttcgagacgcgctattacggccagtcgttcgaccccgaacggctgatcgacttcaagaacggcatcctgagccgagaaacgttcctgctgaagaaatcgttcttcagcatctattcgaacgcggggcaggacttcgacgacgagatcgccaacgaggagcaggacaagaaggaggccgccgaaaaggccgccatgaagtatcaccgcatcaagtcgggcgatacgctgggtgcaatagcccgcagatacggcacgacggtaaacaacatctgccgcatgaacaatatcaaatcgaccacggtgctgcgcatcggccgctcgctgcgggtgaggtagggcggcgcaccgcatacggggctcccaagccccggacacgaaataagccggagtctcggactccggcttatttcgtcaaaagaccgcgcccccaaggagccgtctcccagaccgcaggggtatctatctgtacttcgcaggcttcgaagagagctcccgcacgaagaatcgcagcacggcatcctgctgtccgggcgtcagggtgagcaccgtatgctttccgcgcggcgtcggcgtgaaataggtgtatccctgatcgtccacgcagatgattcccggttcggacaccccgaacatttcgggacgcaggacatacagcaccgacatcatgtcccatgtaggacggtcgtaaggcatcttgcggtaggctttgtagccctcgaccatcgggtgctttccggcccacgcaaaatcggtttcgatactggctccgggataattcaccgtcttgcccagttcgagcgacacgaccgccacgggtacgggacagagcgcgaaaagccgcttggcgttggggatgtcgttcacgatattgtattcggcgcggggcttgtcgccgaagcttccgcccatcaccgaacagaacttcaccttgcgcttcaccagttcgatgccgtccagcggcgaatatttgtcgccccagctctccagcaggcggccgagattggtcgagaaaccgacggagacgaccacgaccgagctgtcgggactctcggccagcaggcggcggtaaagggttacgggatcgccgtagtcccggtccctgcggctgcgggggaaaagtcccgactcgcagacagcgcgcgcgtagtcgtcgcgtttgagcaccacgccgtcacggacccttccgaccggtatttcgggatagccgtaccacgtattcatcatatctatatagcggggcgagaattcggtatccttgctgctgaggatgccgagcaggatgatttcaccccggtccaccgccttgtaaagcatatcgagcgccagcggatcatccacgtcgttgcccatgtcggtatcgaaaatcacccgcaggggtgcggcgggcgtctgctgcgcccggaccgccggcatacagagggcagcaagcgccgccagaatcaaaagtttcttcatcgtttcaggttattcagttgcctccggagagaatgacacatgccagaccgagaataaagaagaggaacatgaccgccagcagccagcccaccgagcggcccgcgccccggaactcctttcagacgaaaacgccccagacggcggcgaccatcggcgcaccctgtcccagcgcataggaaatggcggccccggccttacctgcggcgatatagctgaacgccgtacccagacaccagaccgcgccgcccagcatcccgaccaaatgggtgcgggccgagcctttgaaataggcgtcgtaaccgaccggcgtaccgacgaagggccgtttcatgacgagcgtgttgaagacgaagttgctcagcagaacgcccaccgagaagatgaagatcgccgaatagggcgtcagcatgccgggggtgggggattcgaagttgtcgaggtccatcgccgcgcccacgaagcggtagaagaacgacatcaggacgccggccagcaccgccagcagaatgcctttgcggttttgcgccgaggaacccggctccttccggacccgtcctgaagcgattccgttgcagacgatggcgatgacaatcagcaccacgccgaggaacagaatgacggggtcgcccttcggcgctcccatgtaattgatgaccacgcccaacaccaacgccagacccacgcccagcggaaaggcaacggccagtccggccagcgacacggaggcggaaagcaggatgttcgaggcgttgaagatgacgccgccgagcagtacgctgccgagggccttgggcgcagcctgcgcgagatcttcgaggaagggacgcccttcgctgccgatgctgcccagcgtaaagcagaggatcagcgaaaaaaggagcatgccgacgacatagtcccagtagaagagttcataacgccatgtcctgcctgccagtttctgggtgttgccccacgagccccagcacagcatcgtgacaatgcagagtatcacggctgtcgcataattgtttactacaaacatattcgaagttttaaagggttgtcattcggtcggcggatcggccgttattcgcaaaacgggcgtcgtccacttcgcggcgcgtcggaatcgagctttgcgccccgatgcgggtcaccgagagggcggcggcgtgggtggcgaagcgcgcggcgtccaagagcggcaagccttccgccagcgccacggtcagcgccccgttgaaaacgtcgcccgccgcggtcgtatcgaccgccgaaacacggcatgcgggcaccacggcgcaggtatcggcatttttcacgagcgcgccgcgcgaaccgcaggtgacgatcacgttcttcacccccttgttcaacagcgtctccgctgcggctgccgcatccgtcccgttcagtacgggacgtcccgtaagcagggcgcactccgactcgttgggcgtaaggaggtagacgtatttcaggtacttttcgtcgatctgcgccgcaggcgccggattgagaatcaccctcacgcccaattcggcggcggtctgtatcgcgtattccacggtttcgagcggtatttcgagctggatcagcagatagccggccttcgccagttcgggccggacgtcgtcgatatcctttctggaaagccgcgcattcgcaccgggagccacgacgatgcagttttcggccgaattatcgaccgtgatgagcgccacacccgtaggggcctgagaatcgcggacgacatgcgaagtatccatcttttccgcggtgtagcgggccatcagctcatctccgaaaaggtcggtcccgatacgcgccacgaaaagggcgtcgccgcccagccgcgcgacggcgacggcctgattggcgcctttgccgccggaaacgatccggaattcgccgccgagaacggtctcgccgggcgacggaatccggtcggcccggacgatcaggtcggtattggcgctgccgacaatcacaattttttccataggttataatttcagattatcaatgtcaagtgttgcgcaatcgtttgtgcaatcacatatgcaagtataaagacaataaaagaaaattgcaagcttttttatggtattttttcatatgcctatcattattttcttgccgcatccgaaaaaatggctacttttgttcggaacaaaaaccgggcaacaatacgcaccggcctattcgggcaggcgggactgccggccggagagccggttgaagagcaggtcgggaagcaggtcggagagcaagttaaagagcagaccggggacagaccggggagcagaccggaaggaccggaaggaccggaaacggggccggcagccatacgggttccggcagccataagataagataatataacagaacgccgcatgaaagagacgctggtcaccatatccaaacggaccggattcgccatatcgaccgtttcgcgggtgctgaacggacaggcggagaaataccgcatcagccggaaaaccgtcgagctgatcctcgccgaagccagacggtgcgactacacgccgagccttctggcgaaaggactgcgcatgaagcgcaccaatacgctgggcttactgattccgcaggtgtcgaacccctatttcgccgacatcgccagcgccatcatccgggaagcccgcagccacggatatacggtaatggtggtcgataccatggagaacgaagaaaacgagcaggagggcatccggacgatgctttcgcgccgggtggacggcatcgtggccgttccgtgcggccggacgcccgaccacctcgaaaaggtggaccgctcggttcccgtcatgctggtggaccgcagtttcgagcgcacctcgctgccgtacgtctgcaccgacaactaccgcggaggcgtggaggcgacccggattctgctgcagagaggacaccgcagaatcgcctgcatacagggcgttccccattcgatgccgaaccgccggcgcgtgcagggttatctcgacgcgctccgacaagcgggactgcaggaggaagccatcataaccggcgacgcattctcgctggagaacggctaccggcagaccaagctcgccgtggcaggtcccgaccgccccacggcgatattcgccctgagcaatacgatcctgctcggcgcggtcaaagccatacgcgaatcgggtttgcggatccccgaagatatttccgtggtgtcgttcgacgacaatccctatctggattttctggttccggccataacccgcatcggccagcccgtcgaagagatcggaaaaacagccgtcaggctgctgctggagagcatccgggaggaggtacgctgccggacgcaactgcaactgccgcctgaaaggatcgtccgcgactcggtcgcaaacccgcgtaccgcaaagtaacgtccgctccggacatacccccgccgcagtcacaagacaagcgccggcatccaagtccggtcgaacgcgcacgacacgtccttcgcggcgctcctgcacactgacatgacagacaaaaaagcccggacgtccggtccgggcttttttagataaaatccgattactttttgttctgaatcgcgtccacggcgtcgatcaccgcgccgcggaaacctttgcgttcgagttcggcgacgccgacgatcgtcgtgccgccgggcgaacaaaccgcatccttcatcgcgccgggatgctgtcccgtcgccagctgcaatttgcccgtgccgacgaccatctggctgaccatgcggtaggcgtcggcgcgtgcgatgccgtgtttgacggcggcgtcggcgagcgcttcgatgaacatcgccacgaacgcgggaccgcagccgcagatcgtcccggcaagtcccagcaggggagtatcgacctgcatcaccagcccgacgtgcgaaaacagccgctccgtctctttccactcggcatcggagagcgagtggagacgttcgcagacaacgattccctcgccgacggcgaccggcgtgttgggaaccgtactgagatggtgcgttccgggcgcaagtatggtttcgtactttccgaacgtcatgccggcagccaccgaaacgacgattttcccggccagcagctccttcacgggcgacaaaaccgcttcgacctgatggggtttcacggctacgatcaccatgtcggcgaactccgcgacacgggcggcatcgtcgaaagccagaaagcctttcggctccgtattgcgccgcagtttggcccggtcgcgggcgcaggcgccgatctggcagggcttcaacgcccccgtcgcggcaaacccttcggcaagagcctgcgccatatttccgaatccgataaatcctaccttcataatacgattcatttttcaaatttaggcttcattccggctgtccgccgtttataatcccgctcctgcgcacctccggggatttaccgcggccggaacggacggcttctccgtttacttcgcgtagtccctctccccgaaaatcagcgacccgacgcgcaccatgttcgacccgcattcgacggcgaaggggtagtcgtgcgacatgcccatcgacaacacgttgaaccgcgccccgaaatagggctgcaaaaggtcgaaacagcgtttcagctccgtgaaatcccggcggataacctccccgtcgtcggtattggtcgcaatgcccatcacgccgcggacgcagacatcgggcatccgggcgaagggcgccgtgccgacataccgcataagctccccgatctcccagcccgacttggtctcttcgtcggcgacatgtatctccagcaaaatctcgatcgtgcggccgcatttggcggcctcgcgctggatggcttcggccagacgcgcgctgtccaccgaatggatcagcgagacgaacggcgcaatatatttgatcttgttggtctgcaggtggccgatcatgtgccactcgatatcttggggcagcgcctcgtatttttcgcgcagctcctgcggacggctctcgccgaagacgcggtgtcccgcgtcgtaggcttcgcgtatcgcctccacggggtgggtcttcgacacggcgaccagcgtgacgtcttcgggcagcgtgctgcgcacgaacgataattgacatgctatagacatagtaagcttgatttcgatgcgtaaaaatacgcaaaattcgtacaagacggaacaagcccggaaaaattccgggcctgcatgccgttattttcccgcaggatcagcgcaccagcacgatttccgtacagtaaacggtcccggaaaagatgtcgagcgacttcgccgcacggtcgtagacctgcacccggcttccgccgtcgcccaagtcgcagagcatgtaaatacgatcctgaatatcgctgtcggggaaggtcacggccgttaccgagcgtacggcggccggcactgccgccagcacctctccgaaggtcatcgccacgggatcgtacagccggagttccgtcgcgccgtccttcaccacggcatagccgcagcagacggagtgtttcggtccggcggcatcggacgcggattccacgatccagaaggggatcatcccgtcggcatagaccggatcgccgagccgcgcttcggcgcctgccgaacgcatgccgaacaccatcggcgtatagcatccctcggcgttgttcacggagagcatcacatagccgtcgctgttcatcacgaagggactgccggtcagcattccggcgccgataccctccggcatccgccacgaaggcggcacgacgacgctggtgcgggtttcggtcatgcccagaatgatgcagtaattgtcttcgcacaacaggtaggcggcttccgaattgggcagcacgccggtcgtcacgacacggtcgccgccggaatttctgaaatagcgcatcgtcaggtcgtagaaggcggccgaccgttttccgccgtcgagcgagagtccgaagatgcagttcgaaccggggcggttcaccggatggatgaagtggctgccggggaaccgttcggtgcggacgatttcgcccgtttgcatgtcgaattcgctgattgcgacctcgcccgtatcgtcattgcaaaccccgtagagcgtatacgacgcaggtggcgtgccgtcggaaacggagatcctgccgagcggcatggctttgccgcggcggaaaagcttcacctcggccgtacccgcaggatagccgccgggagcgaggaacgtgatgctcgactcggtgcgggaggtcactacgccccagacgccgtcggcgtagccttcgctgatcgccgcgttggtcaggggccacgcgatgcgcagcatgatgtcgtcgccggcttcgaatcctttggccgaaacggtcacctcgtcgccgggggcgaacgtccgcgcctcggagggcatcaccacgtcggttacgaaagggattccttcgccgtcgtccgaactgcatgcgcagaggaaagttccgagcagcagcaaaagcaggtatttcttcatcgtcgtcagtctgttgtcatcctccggcaccgggggagggccggaatacgaccggttcgcattcgacgcaaagataaggtttaacgcccttatatccaaataaaatcgcgcttttcacccgcgcggcgttttgccgtttaggatttgtttcgtacatttggaatcaaaaccttagaaatctatgaaaaaactccgctattgccttgctgcaacggccgtattcgcctacggcgcggcagcggcctgcaccaatttcatcgtcaccaagggagcctcgaccgacggttcggccatggtctcctatgccgccgactcgcacgcgctgtacggcgcgctgtaccacacacccggcggaagccacaaggccggcaccatgatgcccgtctacgaatgggacacgggacgctatctgaccgacattccccagctgcgcgagacctactcgacggtgggcaacatgaacgaacattcgctcatcatcggcgagacgacatacggcggccggccggaactggccgactcgaccggactgatcgactacggttcgctgatttacatcacgctccagcgtgcgaagacggcccgcgaggccatcgccacgatcgccgagctggccaacacctacggctatgcgtcgagcggcgaatcgttctcgatcgtcgaccgcgacgaagtgtggatcatggagctgatcggcaagggatacaaggccgacggcaagggcggcaacgccaacaagggcatcgtatgggtcgcacgccgcattcccgacggatatgtttcggcgcacgccaatcaggcgcgcatcacgaccttcccgaagaacgaccccgaaaactgcctttacgcgcccgacgtcgtttcgttcgcccgcgaaatggggtattacgacggccccgacgcggatttcagtttctgcgacgcatatgcgccgctcgacttcggcgccctgcgcgcctgcgaagcccgcgtctgggccttcttccgcacggtggccgacgatatggaccgatacgcggattatgcgatgggccacaacgccgcgaaccgcatgcccctgtgggtcatgccccgcgaaaaagtgtcgcccaaaacggtcttcgactgcatgcgcgaccattacgagggaaccccgatggacatgaccgccgacatcggcgcgggcggcagtgcatgcccttaccgctggcgtccgatggagttcgaggtggacggcgtgagctatgtcaacgaacgcgcgacggctacgcagcagaccggattctggttcgtggcgcaggcccggccgtggaatcccgccgacatgggcatcctctggttcggcgtggacgacgcggcgacttcgtgcctgacgccgatctactgctcggcgcaggaggttcccgcatgcctgagcgagcagaacggctcgatgctcgaatattcgcccacggcggcgttctggctcttcaaccgggtcaccaacttcgcctacatgcgttacgacatgatttcggccgacatccgcaaagtcgtggacaagtgggagaacggcatgctgaaaaccgtacgcgaggtggacgccgaagcgctgtcgctctcgcccaaagcgcgcggcaagttcctcacggcgttcagcacggcgacggcgcagcagttgttcgaccgttggtctaagctggacaaatacctgctggtgaaatatatggacggcaacgtcaagagcgagaaagccgacgtgctgaccttcctcgacggcgacggcggaccggcgcacttcgtggacaacggcaacggcaggaacattcccgacaagatccagttccccggttacaacgagaaatggaagcgcgccgtggcgaaggacaacggagaaatcctccgggtcgtaaaataacgcggcaaagccccttccggcaaatcccgtcccgacgggccggaccgagaggggaacggtaacggacaacaaacattcaaccgaattatgaaatacgatattatcgtcgtgggaagcggaccgggcggctacgtcgccgccatacgcgcttcgcagctgggccgcaaagtggcgctcgtggagcgggccgaagccgggggcgtgtgcctcaactggggctgcatcccgaccaaggcgctgctgaaaagcgcgcaggtttacacctactgcaaatcggccgcacattacgggctcgacctcacgggcgaagtgaagcccgatctggaaaaaatcgtggcccgctcgcgcggcgtggccgagaccatgagcaaaggcgtggccttcctgctgggcaagaacaacatcgacctcataccgggattcggacggctcacggcccccggaaagctcgacgtggacggcacggagtacgaagccgaccacatcgttctggccacgggggcgcgcccgcgcgaaatggcgttcatgcccatcgacggcgagcgcgtcatctcgtcgcgtcaggccctgacgcttgcgaaactgcccgaaacgatgatcgtcgtgggttcgggcgccatcggcagcgagttcgcttggttctatgcggcgctgggggtcaaagtcaccgtcgtggagtacatgccccgcatgatgccgctggaggacgaagaggtgtcgaagaccatggagcgcgcattccgcaaactgcgcgctgcggtgctgacatcgacgaccgtaaagtcggtccgcgtcaatacggaaggccgctgcgaggtggagatcgagggcaagaaaggcgctgaaaccctgacggccgacatcgtgctttcggccgtgggcatcaaatccaacatcgaaaatatcggtctcgaagagctgggcgtcgccgtcgagcgggacaaggtagtcgtagaccagttctaccgcaccaacgttccgggcgtttacgccatcggcgacatcgtgggcggccccgcgctggcgcacgtcgcctcggcggagggaatctgctgcgtggaggccatatgcggcctcaatccggctccggtggactattcgaccattccgtcgtgcgtcttcacctcgcccgaagtggcgtcggtcggcatgaccgagcagcaggcgcaggaacggggcatcgcctacaagacggggcgtttccccttcacggcgtcgggcaaagccacggccgcaggcgaccgcgacggcttcgtgaaactcctcttcggcgaggacgacacgctgctgggcgcccacatggtcggcatgaacgtaacggagatgatcgccgagccgacgctggcacggatgctgggcgcgacggggcaccggatagcccgcacgatccatgcccacccgacgatgaacgagggcgtcatggaagctgccgaagcggctctgggcgccgcgatccatttgtaaggccgaaacagatcaagccgataaacaaaagaaccgcccctctcctgccggaaggggcggttttcgtatccgcggcggccggcctcgccttaaagcgcaaccacgagacgcatcccccgccccggaacaaaaaaaagagtctcgtttccgagactctccgcagcttatctgaaccactcttccagatggttgcggccgtaaaaataatagaccgcaagtcccagccagctggtcagcagtaccacgatcgcggcaatgactttgccggcggtcgaaatgtttttcttgaagatgtccatgacgcaccagattgcgcaggcgacaccgatcagccaaatgatagttccgatcataattttaaagtattagagtttagtaaaacgtttttcgttcgaatacgccgggcgggtagaccacgtcgctcagaaacaatccctgcgccggagcgccgccgctcgaccgcgaaaggtcgcggctcccgacgatctcgcggaagccgtcgggcgtatagcgcccgcgtcccacatcgaccagcgtcccgaccagcgaccggaccatgttgcgcagaaaacggtcggcgcggatcgtgaagcaaagcacgccacgctcgtcggccgtccatgcggcgtgcatgatgcggcagatattggtcttgttgttcgaattgagcttggcgaacgaggtgaagtcgtcgtattccaacagcgaagccgccgcctcgttcatccgttccatgtccagcggcacgtaatactgccacgtcgcatcccgcgtaaagggattcttgcgcggttcgatatagtaacggtattcgcgttcgcgggccgcgaaacgcgcgtgcgcatccgctccgacgggcgtcatgctcccgacggcgatatcgcccggaagcaggaaattcagtttgtagacgacctgcgccggatcgggcaccggttcctcacagtcgaaatgcgccacgtaataggaagcgttgacgcccgtatcggtgcggcccgcccccgtcacctcgattttttcgcgcagcagggtagtgagcgcccgctccagcgtctgctgcaccgacggcatgtcgggctggcgctgccagccgcagtaggcggctccgttgtaccgaagttcgagaaaataacgcatggcgatcaatgaggtttccgcaaaattacaaaaaattttctaacgccgcggcctgatattcagttttacgggacggatcatgttttcgggtttcagcacctcgtccagctcctcgcggctcaggatgccgtgttcgagtaccagctcgtaaacgccgcgcccggtttccagcgcctccttggcgattttcgtcgaattcttgtacccgatgatcggattgagcgccgtcaccacgccgatactgttatgcacgtactgcagacacctctcctcgttggccgtgatgccctcgacacagcggatgcgcagcgtgtcgaagccgttgacaagcagttcggcggactcgaaacagcactgggccatcaccggctccatggcgttgagctccatctgcgccgcttcgtcggccatcgtcacgcagagttcgttgccgatgaccttgaaggcgatctggttcatcacttcgggaatcaccggattgaccttgccgggcatgatcgacgagccgggctggcgggccggcaggttgaattcgcccagcccgcagcggggacccgaagagagcaggcgcaggtcgttgcagattttgttcatcttcgaggcgatgcgcttcatggccgaagagtagccgaccatgcagaccgtgtccgaagtggcccccacgagatcctcggcctgtttcacgtcccaccccgtaatctcccggatggcggccgtacagcgctcggcatagcccggttcggcgcagatgccggtaccgatggccgtggcgcccatgttgatagacagaaactccgaagccgcatggtcgaggttctcgacttcgccctgcaggacgctcgcaaagccgtggaaagtctggccgagggtcatcggtacggcgtcctgcaactgcgtgcggcccatcttgagcacgtgggcgaactcttcgcccttgcgggcaaaggaggcgatcagctccatgaggtgtttgcgcagttcgaggtgcgtggcataaagtccgaggtggatcgccgaagggtaggcgtcgttggtagactgcgagcagttgacatggtcgttgggcgagcagtactggtattcgccgcgcgcgtgccccatgatctccagcgcacggttggcgatcacctcgttggcgttcatgttggtggtggtgcccgcaccgccctgaatcatgtccacggggaagaattcgtggaatttgccctccatgatttcacggcaggcctgcgaaatggcgttgaaaagctcgtccgaaagcagccccatgtcgtgattggcgacggcggcgcccagtttcacgatcgccagcccccggataaagaggggatactcgcacaaccggaacttgctgatcgggaaattctccagcccgcgcatggtctgcacgccgtacaatacgttttccggcacctcaacacacccaagcaggtcgcactcggtgcgtgtctttttctgttctttttccatactcattacaaactataaagattaaagccttctttcatttcgaattaaaatcgaacaaccatttaaagttaataaatatttcccgaacagaaaaatattttcccgttcttcgtccgttcagcgtccattggaaagataaacgcgcccgcggcggcagttgaaaaatttggcagtgcggccgggttgtattatctttgtacgaatttgcacgacaataaagacggaaagcatgaaagcagctatcataggttacggcaaaatgggccgcgagatcgaaaaaatactcatcgaacgcggtcacgacgtgacgctcgtgatcgacaccgacaacgccgcggacctcaacgccgcgaatctcgccggagtggacgtggcgctggaattcaccatgccctcgacggcctacgccaatatccgcacctgcatcgaaaacgcgactcccgtggtgagcggcaccacgggctggaccgaccgcttgggcgagttgcagcaattgtgccgcgagaagggcggggcgctgttctatacttcgaattattgtctgggcgtaaacctgatgttccgcctcaaccgtcagctggcggcgatgatcgaccgcgtcggcggctatgacgcgaagatcgaagaggtacatcacacccagaagaaggacgctccgagcggcacggccatcacgctggccgaaggcgtcatctcggagctgcacgacaagaccgcgtgggtgaactacgcgccggggatcgaacacgcgacgaaccggatcgaaactccggcggacgccgccgcggaccagctcgaaatccgctccgtgcgcgaaggcatggttccgggcatacacaccgtgacctacgaatcggcagacgatattctggaactgaaacatacgattaagaaccgccgtacgttagcaatgggggctgtcatagccgccgagttcttatgcggcaggcagggcgtctactcgatggacgacctgctgaaataaatttacgaatatgggaaaaatcaaggcattcttccgcaacaaatgggtcggcttcgcgctcgcctcgctgctttacacgctctggttcgtcgtatggaccggcaatctctggatgctgctggggctggcggtgatcttcgacctctacatcacgaagttcttctaccgctacgtctggtgccacaacgcgcgtatgtgccagcagagcaaggtctacaagaccgtatacgaatgggtaaacgccatcatcttcgccacggtcgtggcttcgctggtgcatatcttcgtcttccagatgtacgtcatcccgacctcgtcgatggaaaagtcgctgctgatcggcgactatctctatgtgagcaaggtgacctacggaccgcagatgcccaacacgccgctgtcgttcccgttcgtgcatcacacgatgcccttctcgcagaccaaaaaatcgttctccgaagccgtcaagtggccgtaccaccggctcaaggggttgcgcaaaatcaaacgcaacgacgtggtggtcttcaacttcccggcgggcgacaccgtccttctggagaatcagaacgccacctattacgacgtgctgcgcagctacgaggattcgttcggcaaagaggagggacgcaagcgtctggccgaaaaatacaccatcatcagccgccccgtggacaaacgggagaattacatcaaacgctgcgtggccgttccgggcgactcgctcgaaatacgcaacgggcaggtgtgggtgaacggcgcgccgcaggaggggattccgggcatccagtaccagtacgcagtacaggtgtcgtcgcccctttcgcagtacgccatcgagaatctcggcattacggagtaccggggcaacggctcggtatacgacatgttcctgaccgaagaggccgccgggaaaatcgaagccctgaacaacgtgatctccgtccgccgctacattttctcccccaatacggaggtcttcccgcagtggaaggagccgcactggagtcaggacaactacggaccgatctgggtgcccaagaaaggcgcgacggtggagctgacggccgagaacctgccgctgttccgccgcatcatcgagacgtacgaggggcactcgctcgaagagcacgacggcaaaatattcatcgacggagccgaggccaacagctacacgttcggcatggattactattggatgatgggcgacaaccgccacaattcggccgactcgcggttctggggcttcgttcccgaagaccatatcgtcggcaaggcttcgttcgtctggctgtcgctcgacgcgaacaaatcgttcccggcgaacatccgctggaaccgtctgtttacaaaggtgcggtagggtggaaccggaggacagctatctgaccattgcggcgcccgccgaggcggcgtcgagggagcggagcagcaagttcctcgcctatgcctaccccgtgcagcaggaggagcagatacgcgaaatcctcgacggactgcgcaagaaatactacgacgcgacgcaccattgctacgcatggcggctggggccgggaggcgccgcattccgggccaacgacgacggagaaccgtcgggaacggccgggaagccgattctgggacagctgctttcgaacaacctgacggactgcctgatcgtcgtggtccgctacttcggcggcacgaaactgggggttccggggctgatcgccgcatacagggaatcggcggcggaggcgatcgcggcggcccgaatcgtcgaacgcaccgtagaccgcacgatccgcgtcgatttcccctacatcgccatgaacgacatcatgcgcgtcatcaaggagcagcagcctaaaatcgcatcgcaggagttcgacaacctctgcacgatggtgctcaccatccgcgaaagccgcgccggggagctgaccgaaaaactgaaaaaagccggaggaagcatcgccggcgaggacatttgagaatcgaaagttaaaaatcgaaaaccggaaatgcggtccgccgcattccgcggtttcagcgatacgaaatgacacacgaaaaatccatctatatcaaaggcgcgcgggtccacaacctcaagaacatcgaggtcgagattccgcacgacaaactggtcgtcgtaacgggcctttcgggttcgggaaaatcgacgctggccttcgacaccatcttcgccgagggacagcgccgctacgtcgagagcctttcggcctatgcccggcagtttctgggcaaaatcaacaaacccgacgtggacatcatcacgggcatcgcgccggccatcgccatcgaacagaaggtcaatacgcgcaacccccgttcgacggtgggcacgacaaccgagatatacgactacctgaaactgctgttcgcccgcatcggacacaccttttcgcccgtatcgggacaggaggtgcgctgctacagcgtggacgacgtggcgacatacattcaggaactgggcgaggggagccgcgccgtcatcgccgcgccgctcgtgctggccgaagggcagggaatcatcgaaaaactgacgctgctgctctccgacggcctgatgagagtctacaccgacggtcagacgcgcctgatcgaggagatactcccctcgatcgacgaaacgaccggagccgcggatattcaggtcgtgatcgaccgcatgcgcatcgcgccggacgacgacacgcaaacccgcatccgcgactccgtggcgcgcgccttctcctacggcgacggcatctgcaccgtcatctcggacaagggcgcggccgaattctcgtcgcgcttcgaggcggacggcatcgaattcgaacatccgtcggaacaccttttcagcttcaacaacccgctgggggcatgtccccgctgcgagggatacggcaaggtgatcggcatcgacgaggatctggtgattcccgacaagggcaagaccatctacgaggacgccatcgcctgctggcggggcgagaccatgcgcaaatggaaggaaaagctggtggagaacgcctataagttcgatttcccgatccatacgccgtttcacgagctgacgcaggagcagaaacggctgttgtggcgcggcaaccaatatttccacggtctggacgagttcttcgcctacatcgactcggagcgacggaaaatccagttccgcgtgatgaaggcgcgctatacgggcaagacgacctgtcccgaatgcgggggcagccgcctgcgcaaagaggcgctttacgtccgcatcggcggccggaacatcgccgacctcgtggtgatgccggtggacgagctgatcgtattcttcaacggactgcagctcgacgaacacgacacgaaaaccgcggcccgcatcctgatcgaaatccgcagccgcctgcaatacctcaccgacgtgggactgggctatctgacgctcgaccggctttcatcgaccctgtcgggcggcgagagccagcgcatcaacctctcgacctcgctgggcagcaacctcaccggctcgctctacatcctcgacgaaccctcgatcggcctgcatccgcgcgacaccaaccggcttatcaaggtgctcagacaactgcgcgatctgggcaacacggtgatcgtcgtcgagcacgaggaagaggtgatccgcgccgccgactacatcgtggacatcggtcccaaggcgggttacaacggcggcgaagtggttttcagcggtacgctggcgcagcttctgaaaaacaaaaaaagcctgacggcggattacctgacgggccgccgcgcgatcgccccgcccgccgcggaacgcggatggagcagttcgatcgtcataaaaggcgcccgcgagaacaacctgcgcaatatcgacgtgcggattccgctgggcgtgatgacctgcatcacgggagtcagcggcagcggcaaatcgtcgctggccaagggaatactctatccggcgctgcggcgcatgctcttcgacacgggcgtcaagcccggcgacttcgacggcatcgtcggcgacgtgcagctgctcaaatcggtcgagatgatcgaccagaaccccatcggcaagtcgtcgcgttcgaatcccgtgacctacatcaaggcctacgacgaaatccggcggctgttcgccgaccagccctacgcccaacatacggggctgggggcttcggcattctcgttcaacatcgcgggcggccgctgcgaagagtgtcagggcgaaggggtcatcaaggtctcgatgcagttcatggccgacgtcgaactggtctgcgaagcctgcggaggcaaacgcttccgcgacgagatactcgaagtcaaataccgcggcaagtcgatctacgacgtgctggagatgaccgtggacgacgcgatcgcgttcttcggcgaggagaagaaggattcgacctgcaaacggatcgtcgagcggctcaaaccgctgcaggacgtggggttgggctacatcaagctgggccagtcctcttcgaccctgtcgggcggcgagagccagcgcgtgaagctggcgtcgttcctgaccaaggacagcgcgcagggcggcgtgatgttcatcttcgacgaaccgacgacgggacttcatttccacgacatcaacaagctgctggcggcattcaacgcgctgatcgaacggggacacacgatcgtcatcgtggaacacaacatggacgtcatcaaatgcgccgactgggttgtggatctcggtcccgaagcgggtacgggcggcggaagagtcgtattcgaaggcactccgcgcgcattggaacagtgcccggatagctatacgggcaaatttctcagcctgcgcacgaaattataatcatggaattcttcacatacagattacccaacggcatccggggcatccaccgtcaggtgaaaagcaacgtggcgcactgtgcgctggtcgtcaatgccggaagccgcgacgaacaccccgaccagtacgggctggcgcattttacggaacacgccttcttcaagggcacccggcgccgccgcgcatggcaggtgaactgccggctggaaaacctcggcggcgaactgaacgccttcacgaccaaggaggacacgaccattcacgccacgaccctgcggggcgacttcccgaaggccgtcgagctgatcgccgacatcgccttccgctcgacgttccccgaccgggagctggaacgcgaaaaggaggtgatcgccgacgagatcaacacctacaaggactcgcccgccgacctgatatacgacacgttcgaagagatgctgttcgccggctcggagctgggccacaacattctgggccgcaaagccgcgctcatgcgctacgacggcgacgcgatccgcgccttcaccggccgcacgcacacgaccgaccagatggtcttctcttcgatcggcaacttctcggccaagacggccgagaccgtcgcggcgcgctatttcgcgcagcaggcggccacgacgcgcggattcgtccgggccgcgaccgcaccccggccgccgttcgagaagaccgtggtgaagcatacccaccagacacactgcatcatcggcggccgcgcgtacggcatcggcgaagagaaacgcctgccgctggccctcgtgaccaatattctgggcgggccgtgcgccaattcgctgctgaacgtcgtggtgcgcgagaaaaacggactgtcgtacaacatcgaagccagctacacgccctacagcgacacggggatcgtggccatctacttcagttcggaaaacggcaacacggcgcagtgcatcgacctgatcgaaggggagctgcgcaaactgcgcaccgcgccgctgacgggccgccaactgtcgatggccaaaaaacagttcatcgcccagctcgccatttcgagcgagagcaacgagggctacatgctcggcgccggaaaaagtttcctgacgcacgacgacgtggacacgatggaacaggtctacgccaaggtgcgttcgctgaccgccgtgcagctgaccgaagtcgccgaagaggtattctccggcatgtcgagactgatttataaataaggttatggaaaaagagatcgtattcgtcctgctcgacgaatttgcagactgggaggcggcgttcctcgccccggccctttgttcgggcgtcatgccgggccgtccgggttcgtacgccgcaaaatacatgtctcccgacggagagtccgtccggtcgatcggcggattgcgcgtaacgcccgattacgacgcttcgacgctaccggaaagttgcgccgggctgattctggtcggcggcatgcagtgggagtcggccgccgcccggcggatcgcgccgctcgcaggcgaagcgctgaagcgcgggattctcgtcggcgccatctgcaacgcagtttcgttcatggccgcgaacggcctgctgaacagcgtacggcatacgggcaacacggtcgaaatgctgaaacagtggggcggggcgaactacacgggcgacgcgctctacgaggagcggcaggccgtgcgcgacggcaacgtcgtgacggcaaacggcacggggtatctcgaattcacccgcgaatgcctgctcgcgctcaaggccgacacgcccgaccggatcgaggcatcgtacaagttcaacaaatacggattctgcaggcagtaatggacgcgctcgaacaatatatccgcgaccacacctcgcccgaagaggagttgctgcacgaactggaccgcgagaccaacctgcgggtcatacagccccgcatgctgtcgggccatattcagggccgcctgctggaaatgctcgtgcggatgctacgcccgcggcgggtgctcgaaatcgggactttcacgggttactcggccctctgcatggccgcagggctggaaggggaggccgaactgcataccgtcgaggttgaagacgaactggaagagctggcgcaatcgttcttcgaccgcagcgcgcacggctcccgcatccggctccacatcggttcggcgctggatatagctcccggactgggcggtgtgttcgacctcgtattcatcgacggcgacaagcgcgaatacccggactactaccggatgctgatgggcgacgacggcggctgtccgctggtgcgcagcgactcggtgctgatcgccgacaacatcctctggtcgggaaaagtcgtgcagccgatcgcccacaacgaccgccacacgcaggcggtgatggagttcaaccgcatggtccgggaagatccgcgcgtcgaaaacgtaatcgtaccgctgcgggacggcctgaacctgattcggataaaataagccggaaacaaccgattaggatattgtaaaatgactttttcctgctttccccgacacggagaaagcgggattttttcgtacctttcggaaaaatcaacggacaaatggaactaagcgaattacagcgacgggtcgatgcgtggatcaaagagtacggagtgcgctatttcagcgaactgaccaacatggccgtgctcaccgaagaagtaggggagctggcccgcatcatggcccgcaaatacggcgaccagtcgttcaaggagggggagaaatgcaatctcgcggacgagatggccgacgtattatgggtgctgacgtgtctggccaaccagacgggcgtggacctcacggcggccatggaagccaacttcgccaaaaaaacctcgcgcgacaaagagcggcaccgcagcaatccgaaactctgacggagcgcattctcacacaagcggagcggcgactcggattaaacttcccgacaggcccgctccgctattgccgtggaacgtgcccggcacggtacagcgcgtttggtgcgagctttcgcgcgggggccagcaactcttcgtcgtcggcaatccttcgggccgaaatcactccacgatgtcgatgcagatcgcaccgtatttcccccgcacgccataggtctgcacggcttcgacgggaagcatgtagaaatagtgcatcggcacgtccgccgacaccgagaaggcatcggcccggcacatcttcagccacgattcgatcgaggaaaaagcaccgttgaaaaccacgagcggcacccggtcgggatagatgtccccgataacgacgccccggccggcgccgtagcgcgccatcgtcgcagagtcggtgtatatttcgagcgtgcgcaggatcagcccgtcgataaactggaagctactgcccggaacccgctccccgtcgagcagataaacggcgtcgggcggcaacgtacgccaaagttccttgggaaccttgaatagggagagctcgcctccggccctgcgcaccgaatcgtattcgtcgcgcagcgtgtaggcggcgatatgctttggggcgctgcgccacttgtgtccgggttcgtcgtatacgtcgtcggcccacgtatatcccgcaacgttgcccagcaggtgcggacgcacgccttttttccggttgcgctcggtaaagaatttcagcaaacgcactttctcgcgccgggtagtgtccgacaagcgcatccggcggtttttagccttcaccttacgcacgttccacaatgtcaccgcatcgtatgccgcagcttcggtcgtacgccgccggttgagtttataggcgaacggacgcgcggcggccaaggaatcggccgcaaaagcgggggagggcagatcggcgatcgcttcctgccgcgcctcgtcgaagcgcagctgcgcttcaggcctgcggggttcctgcgccgccgcactccccatatatatacatgccgcaaccaaagccgccgtacggataaacatatttttcatttcaaaagctactaaaattttagtaaaagtaatactaaatttttagaagtgcaaattccaaccggggtaatatgacaaaaagcgccccggcctgaggaccggggcgcttttgtcggactgggcagccgcggctactccagtttgaggtctttcttgatggcttcgatcttggcgtcgagttccgcctgcacccgctcgaaatcggcgaccgattcgagcggagcctttactccgaagtagaacttaatcttgggctccgttcccgaaggacgcaccgagacgatcgaaccgtcctcggtgaaccactgaagcacattgctcttatcctgctcgatagggctcttcgcaccgctcttcacgtcggtcgtttcgagcgacaggaagtcgttgatcttcaccacgggcgatcccacgatggtcttgggcgggttttcccggaattcgaccatcatcttctgaatcagctcggcgccctccttgcccttgcgtacgaccgacacgaggccctcgcggaagaagccgtacttcacataaagctcctgcagccactcgtagagcgtcaggcccatcgtatccatggcccaagccgccgcctcggccgccagcgagcaggccgacacggcgtccttgtcgcgtacgtaatcgccggccagatagccgaagctctcctcgccgccgccgatgtatttggccttgccctcgttctcgcggataatcttggcgatatacttgaagcccgtcaggcagtcgtaacacttcactttgaagtagtcggccacggcgttcgccatctgcgaggtcacgatggtcttcacgacatactggttgccgtccagcttgccgcgctcggcccagcgagtcagctggtagctcagcagcagcacgagggtctgattaccgttcagcagcacgtattcgcccttcttgttgcgcagcgcaacgccgatgcggtccgaatcggggtccgtggccagcaccagatcggcgccctccttggccgcaaggtcgatggccatcgacatggtcttgcgctcttcgggattcggcgactcgacggtggggaagttgccgtcgataacggcctgctccggcacgagcttcacgttcgtgaagccgaacttcttgagcgactccggcaccagacgcacgcccgaaccgtgcagcggggtgtagatgatcttcatatcgtggtgctttttgacgctttcgggcgacagcgacagctcatgcaccttatttaaatagatttcgtcgaacttctcgtcgaggatcgtgatgttctgcgggttcttgcccagctggatcatgttcacgtcggtaatcttggcgacctcggcgatgatgttcttgtcgtgcggctcggtcacctgcgcgccgtcggtccaataagccttgtagccgttgtactccttggggttgtgcgaagcggtaacgaccacgcccgaatggcatttcagctcgcggatggcgaagctcagttcgggcgtcggacgcagtgcgtcgaacagaaaaacggtgaatccgttcgaggcgaaaatgtcggcgacgcgctcggcgaacatacgcgaattattgcggctgtcatggcccacggcgacccggatctgctcgcccgcgaagttcttgcgcaggtagttggcaagcccttgtgtggcagcgcctaccgtgtagacgttcatgcggttggaacccacgcccatgatgccgcgcaggccgcccgtaccgaattcgaggtctttgtaaaagctctcgacaagttctttcatatcgttgtccatcaggtatttaacctgcttcttggtagcttcgtcatagtggccgtcaagccatgcctgcgcctttttcagcaccgattgttctaattcgttagccataagattattagttttacttataatttaaatgtatattaatttaaaaaatttatatgcaaatatacaaattatatttctattattcaatatcagggagttaaaattgagtgtccggaaaccgttgtttttctatatataaaaaaagtgaaattgcaacataaattcggaaatctttttg

SEQ ID NO: 10 - DNA, 608369 bp, Alistipes onderdonkii
  source 1..608369: mol_type = genomic DNA
tcaatacacctcgaattcatagattctggcggtatttccttcgctttggtcaggttttgagaccacgagcctcacgtatcgggcggttacgggctgcggaagaaccctgtcggtttcgagggccgtgttgtcgtaaaccgtgtccaccgttttccactcttcgccggggctccggcgcacctgcagggagtactcctttgtgatgtagtccagggcttcgagcgcagcgtgcatgacataccaaccccggatcgtggtctcccgtccgagatccacccccagcagcttgggtttagcatcgctgtaatcgcaccacttggtggatacgtcctcgtcggtggcgcactcggccctctcggaggcgttgacctcccccgacctttccacgacgggtttgccgtagagcaggtttcgccgcccggcctgcgaggcgtcggcgcctttcacgggcagctgcacgcgcagcaggtcgcaggccgcaccgatacctccggcggggtcttcggccaccgtcgccgcgaacaccacgatgcgcgggtcgtcgggcagtaccagctgccgtgccccctcggggatgtcgaggccgatgcggaacatgtaggtgaattcgtagggcctgtcctcgttgcggatcatatcatgcttgtgcgtgcccacgaaggccacctgcgcatccttgaggtagggctcggtatgccccgtatggccccactgtccgatgaagccgccataatagggtaccagtgccgtgtgctcctttccgtcgacggtgaatacggcctgcgtgtcgttcatggtcgaggcggccagcaggtagagcttgccatagcgcccgcggggcaggtcgatggtgtcgcggcggcatttgacgccgttctccgcggcgggatcccccatctcgaagccgacacccccgtacacgatgcgggacggcagcagctcggcggcgtaggagcagcccttgccgtcgaagttggcgtccgagcggaacgggttgtaagaggccgttttgacgttgtaaggcagctccaccgccgcctccgcggcgggcgtgagcgcccggacgggcttggcgagtttcacgcggaaagtcttcatgccgaagggcccgacctcgaagcgcagctcgcggccgcagaactccgcgtcgcccacgacatcctccacgccgttgagctcccgggcgtcgacgatctgcgccgcgaagcccaccacggcctgctgcgacccgagacccgaggtctcgtagaaacgaaccacatattcgtccgaatcctcggcctgtttgagcgcccgcagcgccacattggggttctgcgaggaggccagcgagaagctgcggcccagcaccccgccatggcgaggcgcgacgaatgcccgaagcggctggttgagcacctcggccttgcgcacggcacctcccgcgcggtaatcgcccgcgtgccctacgatcgagtaggtgaacgtatggtgtccgaagtcctgcttgttctggtaggcgtagccgcccttggtcgcaggcgtatgcagcagcgtaaggcgcagcgtgttgtccgcgggtttgtcccagccgtacttgctgtcgttgagcaccgagaccccgtagctgccgtccgcgtcggtgaggtcggcccactgctgcgcatagacctcgtaggcggtcgcggtgttgttgccccgcgccacggagcccacgccaaggtcatagaccgcctcggggttcgagaccgaaagcgggaactcggccttcagcagcgcattggacgactgccagtcgatgtcgttcacaaggtcgatcctgtcggcctgggcgccttcgcgcagcgtgatccactgccggaagcgggaatcccccagcgtgcgttccacgcataccgaggcgcgcaggggcccctcttcggccacggtgaccttcacctcgcccgtgatggcctgcggcgatgcgtccacggtcttcttgaggatctcccaggccggccagctgtaagactcgttctgcgggaagaacgcaaggcggatggacttgccggcggccaccagttcgcggccatgacgcttgtcgacgatcgacgagatgtcgccgttggcgtccagcgtaagtttatagacgctgttctccagcccccatgcgccggcctttatcgccggggccttcggctgcccgcccttgcggatgtcgtagacggcataccccgcagccgggacggtggcctcgaccagcagccgcgtctgcccctgctgcgtgcccagcacctgcgagggaacccggacgcccttgtcgtcgtagaccgtgaacttgctgccttcgagcggaagcgtaacctccaccacgtccgagacctcgaaccccgcagcgttgtagagcaccacggggagccctttgacatcggtatccagaccccgcgaaaccgcgccaaccgaggtcgtgagtacgtccccgaactgtttgagcgagatcagctcgtcgttccacgagaactcgtaggcacgggggaggctcgtacccgtaaggtcgtcgtgaaactggtgccagataaagcgtttccaggcctcggtgagaacctcgcgcgggtagggcacggccccgagccagtcggcggcaacggcgctgcgctcggcagcgtccgcaagctgctcgttacggcggttgtagagcttcatcgcggcctgcgaggtatagcaacccgtggcatgcacgtccatcagcaactccccgttccacaccggaagctccgggtgggaggaatagggaagatagtccttgtaaaggcggtcgctcgtggcgctgatgatctccaccggcccgtcgccctgcagtcccagttccaaagcccgaaccgactcgatggtcggggcgccgcccgtgtcccccgtaccatagtaatggtaaacggcattcagagggttgctctgggcgatgtcctgcaggtacttgctgtggctgaggtcttcgtaacgccacttggtcgtatagttgtgcgcgtccatcacggccatgatacgggagccgtcgacgccctgccacaagccgatctcgaacggaatcttgctcgtaccgtggaacgggcggtgccgccacatgagtttctgagtcgagaaaccgataagaccgctgtgggccgcgatcgtcggaagcgtccacccgaaaccgaagcagtccggaaggaagatgtccgtgccttcgaccccgaattcccggcggtagaagtgctgcccgtacaggatattgcgcgtgaaggactccgcagaagggatgttcggatccgtcgcgtcccacgtgctgcccgtgacatgccagcgcccctcgcggatgtaacgcttgatcaactcgtactggtgggggtagtactccttcatccactggtacttgatgcccccttcgaaattgaatacataatccgggtaggtgcccaagaggaacaggttctgatccagcgtctttggaatgtactcacggatcgaacgctgcacatcccagttccactgggaatcaaaatgggcgttcgagactaaataggcccgaactctatcctgtgaaaaggcgtctatacatatgaacagtaataatacaacgggaagaatttttttcatcatataggtttaagattttcggtagtcggttgggaaggggcagaattctgtttcagagccaaggaattgctttgtcaaatatatgcagagtaaaattcaataattattactgtcggtaaaaagggtcggagaatgcactgatgtttactactttgacacaattgtttacaaggtgaagtcgtgcttggaatctgtgttgatgttatttccgtgaaatgaggcatgttcggaaggctgccacatgaagagctttatatcgaacgagacttttttcatgcagggagtgttgtagtatgtcatccaatgctgttccggtcgcggtattccttgggagtgcagttgtacttttttgcgaatgccttgtagaaactgacccggttggagaagccggatttaaagacgacctcgtcgatcgtgagccgcgatttgatcaatagatcgcacgccaccacaagccggcattcgcggatcaggctgctgatgccgatacccttgatctcttcgacctgtcggtagagtttgcgcacgcccatgttcatctgggtggcaatgaattcagccgacagtttgtcgttttcgatattcttgttgataatgtcgacgatttctttgtacagtttacggtgtgacttgtggatcagcttgccgtccacaagttcgaaggcactgatcttggaggcgaaatacgctttgagtgcttctttacgtttgagtagcttttcgaccgaagtgcggagaaaatcgacgttgaagggcatggtgacgtatagttcggcgcctgcattgagggctgctatctgatcttcgatctcgtgtttagcggaaatcatgatcaatgggatgtgcgaccgatcaggattcgacttgatgcgcctagtgaaatccagtgtgttgaaatttgacatcatgtagttgcataggataatgtctggaatgttatcgcagaataccgagtcggtttctgggatacaatcgaagcatatgacgttgaatttgtcggaaaaaagatcggtcatgaaccacaggagctcgtgttcattgtcgatgaccaccatggtgagctttgagtcgtcgaagggagtgctcggaagacggatgggagttgcctgtgtatcggcttttggtatgagttgttccttctcactatgattggcgggggtggaatttgctgtcgcctccgatgcaggcagggtaacacggaaatgtgtccatttgtcggaagtgtctatctgcacatcccctccgaggatatgaatcaggctatacgatatggcaagtgcgagctgatctctcgaattcaactccgcgtcaggattatgctcgaggttgtcgagcatgcggtagcgatccggcaagtggggcaggttgccttcgctgattttcctgccggtataggagattgtgatgttcagcagttcgttcgtcgtgtcgatgcagagttttacgatgccgccgtgttcggtatattttatggcgacggccagggagttgttcaggatcgtgacgatgaaactgctgtccgagttccggcatacctttgctggaatatttgcttcgagcctgatattaaggcctactgccatttccgagaatgcttcgaggatgctttgggcaattccagagatgtcgacagcggtgatttttggcgtcttgtgtcccgtttctacccgccggaattcgagcaaatccgtaatgagtgagttcaggcgttcggcattgttttttatcagtccagcgtagcgtagggtcggctggtcgagatgctttatcctgagtatccgattgacgggggcatatatcagtgagagcggcgtacagaattcatgcgcgatattggtgaagaaattgagtttagattcgtagacttcctccttgtgctgctgttccagttgctgcatgattgcatcgtgatgtcgctggcttcgcttcatcaaatagtgaatgaaaagtccgatacagctcagaatgaagatgaaatataggcttttggctccgttcgagaaataccatggcggtctgatccttatctgtagagttgccgtgcggctctcgcggtttgtggcacaattgtagtatttgactagcagtgtataggtaccgggactgatgttggcgaacgaaaccgtattcgaactcccgttgttgatccactggtcgttgcctccttctaatttatagtaatattgctggttattgccgttaagatagtcgatcgccctgaacgagatcgagaaaacattctggtcgtggttcagctccagcaatcccgaagtgcgaaattcccccccccaccaaaaaactcttcgggggcatagtccacgccgaggactgagagcctgtcaaactggatgtcgggcatgtggatgcttggtttgctcttggcgttttctcggatggttatgaatccgtttacacctccgaacatgacgtattcgccatcttcggtacggtattgggctgcgtcgctgaactccgaaatattcagtccggactgtactccgaacgtgaaggcgaggcgggtgcgagagtcgaaattgataagcccgtggttggttgccagccagaagcggtttttacctgtctttataatgcctcggatcatgttctcggggaacccgttggtgcggtttagcagttcgtactctccgtcgggatgatagatgaccagtcctaatccggtgccgaacaggtagttcccgtcgtcatctttggaaatgcagaagatgtcgttcacggtttcgttgggtattctggagtcgaagcgtagcatcgagtatgagtcgtcacgcgtgtctatcttcatgactccttttccccggtttgcgacgaagaggtagtctccatccggatagagcgaaaagcagaggttggagtagatgtcaccgccgtccaggacgaagtgcttcacgactgtgagtgttggtaagccgtcgcgccaactgattttcgccttgtagacccccatgatgacgctggcgatccacaggtagttatcttgttggtagatgtcatgcacgaaccggattggttccccgttgcacatgaacgggagacgtttgatagtgcgggtgcgataggagtaatagttcagcccttcatgatggccaatccaaaggatgtcattgtcgcccggttcgaaggcaaatactcggttgtcggtgaggcggctgtcagaagccgtgaagtgcgtgaagtgcgcatggcgcagatcggtgaggggtgtataatcgtctatcttgacgatcccatcgcctttgtacccgatccacaggtcgcctttttccagttgcatgcaccgcacgggacggcctagcaatttgctgatgtcggatgagaaagtggatgagatcgagtattcgtcgtcggaataagcgtagactcccttgccgtcggacgcgatccagatgatatcctgatacctgtctttcataagggtgcagactccgcagtttattgggatttcttcccagcgttctaccccggaagaaatgttgagcgtccaaatgccccccgttttgaacccgatgaaataatcaccggcaaaccggacgacggcttgcacggagccatgttttgcaaactgtgtcagcgaggtgatctgctcagcatttttgctgcggtaatcgaattggaagagggtgaggttagcatcaacgaagaaaatgtcgtcaccatcggttttgcagatttcgatctcggccgtgtgtttgtagcgataggagagattcacgcgtggaacgtttttctcgtacgaaatgcggtatcctgcgatgtcaccgtttttatgaaagagtgtcatttcatcgtttggtgtgatgaccatgtttacgattgagtcggctgccaacccgacatctttcatttcgtggcacacatcgtcctcggaaaggaaatagaacagccggtgatccgtcggtatgacgaataacgtattccgggaatccttgtccaagcagaggtttttactgaaattcttataggtaatcaatcggttccggtatttgtcgtatcggtcaagtccatagagcgtagcagcccacagttggccatcttgggtttcgatgagctgttccaccacacttcccgaaagttctttcttgtcccggtcgtaaaggaatggacgcacctctcgtccattgtaggaattgatcccgtctatcgttccgatccataataatccactcctatcctggcaaaggctgaccacacaactatttgataatttgtccttgtcgaatatctggcgtaaagtataggcatgggaaagactgaatgatacaagtgatggcagtgcaaaaatgataaatcgaagtgttgtgtaaacctttttcatcgtatgaggtagattttaagaggggtgcgcaaatgtcagaactaaaataataaatatttcagttgtttcaaaatcggttctgtggattccaaggggcctctttccgtaacaggataaagagcgtcctgtgatcaaggacgctctttatgaagcggatgaaaggggtatgtgatcgcagtggcggctttgcggaatatccgggagtgcaggaaggcctagaggggacggctttgccgttacagtgtttccaagcagcctattcgcagatcgaaagcatgacgggccccattagcccggtttcctgtaacgtcgcattcgccggaggcccactgatcgtccacgtcaggcgcctttcctccgattgcccggcgtcatacaccaagcggttgtaccaggtgcctgtaacctccaccttcagttcgttgcagccctcgttgacggcttccgtaatgtccaactcatagggggctgtccacaaggtgcgtaatttccggccgttgacggacactgctgcgatcatgtctacgcgtcctaggtcgaggtggtatttgcagcccgcctgtttcgtgccaatgtcgaatgtggtcgtgtaagtagctgtgccagagaatgccttaccctcatcgtttgcagcgagctctttccaaggctttaactcattcactaccagtgtttcgggtataccccacccttcggggaaatttatcgtccaaggagtgttgagcagaagtgattgtgtcggtttgcaggttgtcgccgaggggactgttatgtcggagtccttgcggaagaccacaaagcaagagcctgcttgtggcagcctaagcgttacttctgtgcgctccccattgtggatagcgacggctggggtgacactgccggttactggatcccagatttcggcctgtccggtgttgcgaaaatcgagcgtacccgagaatccggtgcccgtcggtgcacagatataataccagtcagctccttcgatgtggcggtgtaaccatcgtgcacccatgcctgttacgtcgggttgcagtccgagtgtttccagtgcttcgctaagcggagtaccggagataaccgttcctttaccgaccttgcggataccgggtgaggctttgccccagatattctttacagctttgtcaaagcgtttctgtgcattgcctgattcgttcagggttgctaggcctgtaggggcgttcccgacgatgacggcaccctgccgaaccagatcgtaaagtttttcgagtgtctcgggcatcagtcgcgggatgtcaggtagccaaagcagtcggtatgtgatgccctctggtgtcacgatcattccgtcacgtacggagagtcggttgagtaggatgtcgtggttacagtagtcgtatttgaagccttctgggaaaggaaaacgttggtcgggtttgtggtcgaattcgtcgcccaagtaccacagtacgtcagagacaggttttccgcgctccagcaggtagctgcagcgagctaggtaggtggtgaattcaggcatgtgcttccaccatgtctgcccgcgcaggaacggtgtgccgatattggagccgaatgaggtgcccggcggaaggaagtcggtgcgtgggttgtgcgtgtaggtatgtagcacattgtgggtcacgccctctatggcattctggttggcaacttcgcgcatacggctcaggtgttcgtcccacgtcagctggaatgatgtgaatgactctgcagctacgcgtggtttgccatagaggcgggcggccgatgcagtaggtttaataggtttgaaattgattgagccgacgaacgtgtccgacggatggcgccagaattcacacatggggacatctgcatatttatagtattcgagaatatcgcccggaaggatatcaccaaaggcggtctcgaaagccaacgtaagcccattggcgtgagcgttatgcgccattccgccaaagaatttttcggtggccaggctgctaatagttgcgcgccagtcccgtagaaagcgtgtcgtggtttcgtgatccttcacaacatacccgaagattgccgggagccattgtcggagagggtagcctgccaattgctcgaactcctgttccatgttggccgtccatgtttgggttttgcactcccaactatccatgagcatgccgtcgagcatacctccatataaggggccgtttgggccgatgagtctcccaatatagcctgcgaattgggcgtcggcaccttcactggagaatttgtcgcactcccagccggtaccttcggctggtgctggcccgtttttcatacccgtattcacgtgtccgatgcgaagtatcgtccagttaccctctggtgcattccacgatagattgccttttgtatccatggcatccgagaggtcaatgattcgggcggggtctataaaggcttctttcgcctgctcgggatgctgtcctctgattaggctgcgcagagtccagcctgcttcggcctcccaattgtctttgaccgcagcggaagaaaggcgtaggcgtccgatccccatggtgtgacgattattgatggagatgcggtaggtgttgaccccatcgatgtcggagcaggctaggctgatgggagattcatcctgccagttactttgggggatttgcagggagcgtattttacgggtagaaccatcaggcataacggcttcgatattcaccgaaatgcctggttcgtagcacatgatggtattgaacccattgatgctcgaaaattcaatcgtgcgcaactttgtagcttcggggaaagtaacttcaacccagttaggttgcccctcgcgtgccggggctaggtggacgactgctccaagggtgccagtgatgagttctttccatgggaggtcgttgcggttgctgcgtacggaggcgggcataaggggtgagccagtgtcgtcctgcggcgtggggaatgcgaggacagccacatcgcggtagtccctccactcctcttcgctcggttgcggccgaggcagtttccagacgacgggtttcccgcccgtaatgtcggtgcggctccacgtcaggtggcgcatggcattggcgggttcgatccaagggccacctgccagtgcccagcctgggcagaccagcatcgtgaaccgcagtccgagccgctggcattccttagccgtgtggtggactgcgtcgtcccacgattcgctcagacaggcgatttggggctcgacgccgggccacgggccgccgaactgaccgtggaaaagttggatgcctgttattccggcggcggcaatagcttcgaggtcggctgtaatgccctctttggagacattgccacctatataatggaaccatgtctccgggtggtagactttgggcggggtaagaaatttcttcgtatcggcctttccgaacggactgtcaagctcggtgcgcggcggaactgctggaacctgggcctgcaaggctgaaatgccgcacaagatggccagtgtcagtaagattctggttgtatttttacccattttgacaagatttatggaaactgtttggaatacataattagcaaaaaaatctctgtaaaatgtacgccggggtgtaaatctggcttactggcgcgaatgtttattattttggcaggaatatttactgaacgcatggcgtagttgcaggttgcaacttgccagaatgttggtataattccatgataaagtgttttattcgcggtttcataaagttgtgtaacaatggggcagatgctgtgttgaggtttgggtcgggttaggttttggaaagacggaatgacgatgccgggcggttcttgtagggaaacaaaaaaggagaaccaaaggttctccttttttcattggatggggtgcagtcgcgaacctgccccccccccggtttgcgcattattctgcggcggtaaccgagaatttgatgactgccttgacctccttgtggagtttggcggttgcttcgtattcgccgacggtcttgatgccctctacggcgatcagcttgcggtcgagttcgatgcctttggcagccagggcctcggccaggtcggtggcggtaaccgtaccgaagagcttgccctcctcggccttcacggccagcgtgagcggcaggttggcgatggtctcggcgagtgcctgtgcgtcggcaaggatcttggcgtccttgtgggcgcgctggcggaggttctcggcgagcaccttcttggcggatgcggtggcagcctttgcgtaaccctggggaatcaggtagttgttcgcataaccgggctttacggtcacgatgtcgttggcgtagcccaggttttccatatctttgatcagaataacttccattgtctcttcctcctttaattatttcatgcaatcggttacgaagggcaggatggcgaggtgacgcgcacgcttcacggcctgggccaccttcttctggaacttctgcgaagtacccgtcaggcggcggggaaggatcttaccctgctcgttgaggaatttcttgaggaactccccgtccttgtaatccacgtatttgatgccgagcttcttgaaacggcagtatttctttttcttgacgtcgaccgataccgggttgaggtagcggatttcagactgtgctttgttctcctgtgccatggtttactcctcctgtttgttagaaagttttgcacgacgcttctccgagtattccacggcgaacttgtcctgcttgaaagtaaggaaacggatgatgcgctcgtcgcggcggtactgcgtttcgagcgtgcctatgagcgagccttcgcccgtgaactcgaccaggaagtaaaaaccggtggtcttcttctgaatagggtaggcgagcttgcgaaggccccacgactccttgttcacaatctgaccgccgttctcggtgatgacaccctggaatttgtcagcgacctcctgcacctgtgcatcggacagaaccggcgtgacaatgaaaacggtttcgtaattgttcataatacgtattaaaattagttaattgtccctcaatggggttgcaaatatacggattatttgtaaaatagcaaagccgcgcacctttttttcggttttatcgccgtatctttgagccgattccgccgccggggtcagtcccgggtgtacggacagcggccgcaaaggcggggaaagtgccggggcgtgtctgcctccggagccggaaacgggcggtgccggccctcgccctgctgcggaaaaggggatggaaatggagcccggaacaggatttgccccgggtttcggcggtcggccggcggcggcctattgcaactggtcgatcacgtcggtgatgcgcgagaagacctcctccatcgaacccgtgccgttgaccgaggcgtatttgccccgggcggcgtagtagtccgagacgacggcggtctgctggcggtagacgtcgaggcggccgcggatcacctcctcggaggcgtcgtcggcgcgtcccgaatccttgccgcggagcaggatgcgctggacgagctcctcttcggggacgtggatgtcgaccatgatgtcgaccttcagcccgtgccgggcgaggagcttgtcgaactcctcggcctgtaccgtggtgcgggggaagccgtcgaagatacagcccttggcatgtttgtgctgggcgacatagttggcgaccatgccgatgacgatttcgtcgggggccagtttgccagcctcgatgtaagattccatgctgcgtccgagttccgtgccgcggcggatctcgtcgcggataacctcgcccgtcgagacatgctcgatgccgtagtgtgctttgagccgttgtgcctgcgtgcctttgccgcagcccggcgcaccgaataagacgatgtttatcatatgtagaagccgaatttgggatttaccggacaaaaatacgctaaatttttgggaaagagtaaagaatccgtaattttgtaaaaaaatttataatatggaaaagaaacgacgcaccgaaatcgccgagctgggtgaattcggcctgatagacctgttgaccagagggttcgacccggcggacgcttcgacgctccgcgctgcgggcgacgatgcggcggtcgtcatgccgccgtccggcgaggcggtgctctgttcgacggacgcactgctggagggcatagacttcgacctgacctattttcccctcaggcacctgggatacaaggccgtgacggtggccgcgagcgatatactggcgatgaacgcactgccttcgcagctgatggtgtcgctcggcgtgtcgtccaaaatgtcggtggaggcgttgcaggatctgtacgaggggattgccttcgcgtgcagggagcaggggatcgacctcgtggggggcgatacgaaggcttcgatgaccggactggtgctgggcctcacggcgctgggacatgccccgaaggagaaggtcgtgtcgcgcggcggcgcacagcagaacgacctgatctgtatttcgggcaacctcggtgcggcgtatatggggctgcggctgctggagcgcgagaagcgggtgctcgcagacgtgaaagacccggaaccgaagttcgcagggtacgaatacctgctggagaagtatctcaagccgcgcctgcgcaaggacattgtggaggcattggccgaggagggcatcgtaccgacgtcgatgatcgacctttcggacgggctttccagcgacctgatgcagatttgcaaggcgtcgaaatgcggggcccgcatatacctcgaccggattcctatcgcaaggcagacctatgccttggcggaggaactgaatgccgacccggtcgtggcggcgctcaacggcggtgaagatcacgaattgctgttcacggtgccgctggccttgcaggagcaggtgatgcgcatggggtgcgtcgatgtcatcggccacataacgcccgagtcgacgggggtatacctggtgacgcccgacggcgcggatatccgcctcaaggcgcagggctttcccgaaaaggagtgattccggggacggatccgggttttccgggcgggagtgaggccgccggaggatcaggactcccgggaaaggtagggccgcgcggggatgcccggcggggaaaaacggaagccgtccgcagcgatgcggacggctttgtcgtacaaggcgtattcgggagccaggtgcggtgtggaacgtgcggtaagcggtaagcggtaagcggtaagcggtgagcggtgagcggtgtgcggcgtggggcgtgccttgagtcttgtgcgggggtgccgggaggattgtccgtctgccgtgccgtgcgggccggcgtgggtgctgttcccggggacgggcgccgtgtgacgggagcggagtgtgccgtgtatgccggaacgtatgtgtgcgctgtgcccgggctggcgggacggtggcagataccgttgcttggcgcaggggaataaaaaaagctgccacaggggcagcttctggctttgcatccggccggattaaagtgcgttcacgtgcagctggagggcgctcttcaggtttgcggccttgttcttgtgcacgatattgtgcttggcgagcttgtccagcatggtggttaccttggggagcagggcttcggcggcactcttctccgaggtgttgcgcagtgctttcacggcattacgtgctgtcttgtggtacagacggttgtgggcacgcttggccgcggtctggcgaatgcgttttttcgatgacttatggtttgccataattctgtgttttttattttttactttttcagttgctaaatcggttccagccgtggctgtgtgcggataggcctgaagcccgctccttgaaaagtattcacccgtagaggcctgccgtttttgctgtcccggttgccggtcgggagcccccccccggttccgtgccgctccgcagccctcctcgttcgtagcccataggagagtcgaactcctctttcaagaatgaaaatcttgcgtcctaaccgatagacgaatgggccaataccactatcgcatacccccgaaagggtgactttagcggtgcaaaggtaaataaaaaagtgagtttaacaaaaaattggcggaaaaatattggatattctatttttttgcgagccggatggtcagcgtcgcagggtcgaacgagatgcccgcgccggcgaaaagccgttcgatatggccgctcgccgccatgtcggccgccgacatgcagtgcagtgcgggggtgtcgatgagcgctgtggcgtcgcagagcccgagcgccacgtcgaggtcgtgcgtcgagaagaagatgcatttgccctcttcgtgtgccaggcggcgcagcagcgacgccagttcgtagcggttgggaaggtcgaggaaggccgtgggctcgtcgagcaggatcacgggggtgtcctgcgccagagcgcgtgcgatcaggatgcgctggcattcgccgtcggacatgcgatccatggtcttgcgggcgaacgacgacatgcccaccagcgagagcgagcgtgacacgatgtcgcggtcggcctgctgcatgtgcccgatccagttggtgtagggcgcgcggcccagggcgacgacatcctcgcaggccaggttggcgatgcgtatcttgtcggtggtgacgaagctgacgatggaggcgcgttgcagcgtggtgagcgcggcgaggggcttgccgcagagccggatctcgccggcggccgtgcccagcccggcgatcgcccgcagcagggtgcttttgcccgtcccgttgcggcctatgagcgccgtgatcgacccttgcgggagcacggcgtcggcgtcgcgcagcaggacgcggcggccgtaggcgagggtgaggccgtgcagcgagatgcccggtgccccgggtgcggggccggcgtgcggtcggggggtatggaggatgtcggctgccattttagaagaggttgcggttgcggacgacgacgatgatgaccaccgggatgcccatcagggccgtgacggtgttgatcggcagcgccagggttttcgaaatgaggtcgcagaccagcagcagggcggcgcccgcgagcatcgaccccggcatgaggatgcggtggtcggcgctggcgaagagcatgcgtgccaggtgcgggacggccagcccgatgaagcccacggggccgcagaaggcggtgacggtaccggccagcagtacggtggagaggaacagcagcgtacgggtgcgttgcacgttgagccccatcgtgcgggcatagttttcgcccagcagcagcaggttgagcggcttgatggcggcgacgctgagcacgagccccgcggcgatgaccgggagcatcagggcgaggttgccgcccgtgacgtcgcccagcgaccccatcgtccagatgacgaacgatttgagcgccgcctcgctcgacaggtattggagtatctcgactacggaactgatgcccgagccgaacatcatgcccaggatgaggatgaccatgatgtccttgatgcggcggctgaccgccatcacgaccagcagcacgagtgccgcgccgagccatgccgcgccggcgatgccgagcgactgcacgaacgagtgcgccgagacgcccagcaggggagcccccagcaggaacagcgctacgcccagcccggcgcccgagctgatgcccagcacatagggcccggccagcgggttgcggaaaagggtctgcatctgcaggccgctggcggcgagcgccgcgccggccagaagtgccgtgacggctttgagcagccgtatccgcaggatgatgtcccgtatggcggggtcgcagtcgccgcccgtgagtgccgcccagatgtcggcgggcgccacggcgaccgagccgaccaggaggtcggccgtgaagagcaccacggtcagcagcgcaagcgccgtgaaaagaaatgtggttctgccgactgccatttagcggtactggaatttgaaggaggtttcgtaacgtacgtcgacggggacgccgttggccgtgccgggcgtccacctgggggatttcttcagggtgtcgatggcgaagacttcatagccctgccgcaccatggcgatgccgtcgtggaaaggataggccttggtataccggcaggggatggcttcggtgccgttgcggtcggcgaagccgtagagcgaaccccgtttgatgacggcgcgcccgtccgagaagtagcggaaccacggttccgcgcccgatgccgccgtttgcaggcagagcagagccgacaggagcattgcgagccgtttcattattcgagccgtttatagtagtagagttccgcggtgtcggcggcttggggattgaagacggcgcacaggtcgtgcagcaccaggtcggggcgtatgacgcccgactcccagaaatcggagcctccggcaggggtctggcggcggttgttgttgaagacctgccggttgcgaacggcggggacgtccgcgaacttggggttctgggccgtgagttcggccagggtattgcacgggccgacgttgatccacgtgtcggcggccgaggccagcaggtaggcctcttcgaggtcgacggcgaccgaggtgtccgagttgtttttcgtgtagacgtattcgccgccggcgtcttcgatcaggcgcaccatgaaactccgcgacgagggcatgaaccaggtgtcgcggtagggcgtgttgagcatcactttggggcgggaaccgccggctgcccccgcgattcgggccttgagcgcgttgtagcgtgcggcgatcccgcggaaagtctcggcacccttgtcgcggacgttgcacagctcggcggccaccatcagccattcggccttgcccagaggcgactcttccatatagtccccaatatatatataaggaatgcccagttcgcggagtttgcccgtgacgacggtgttttcgcccgtcacgccgtagagcaggacgaggtcgggccgcatggaggccagcagttcgaagttgaggttggtgtcgtatcccacgtcgcgcacttcgccgcagtagcggtgttcgttgacgtaggtgttgctgatgtaatcgatgcccgaaacaccggagatgcgccgcacctcgcccagggcgtcgaacatggccacatggctcgaagacatgcagacgacgtgccgcacgggggctttcacgacctgggcgtcgaggcccgccggggctttggccccctcgcgcaggatgagcaggtgctgctcgacgttgccggctccctgccacgggttgcggacggtgaccagggtcgcggcgtccttgtccgagccgcggatgtcgaatcccgaagcatattcgggtgtgtagacctcgattgtgaaatctgcggcagagcgcgttgcggagcctccgcagccgctggccaggaacccgaagaataccgctatgagaagtgcgaatcgtttcattgaggacaaaattagaaaaaaatcccgcagaaatgtgacgatttgtgaaaaatacactatatttgcactccgaaacgctacggggtgtagctcagcccggttagagtacgcgtctggggggcgcgtggtcgcaagttcgaatcttgtcaccccgactgatggaaaatccttgatatttaatcgaatatcaaggatttttcttttgtgatgtatagccagaaaagtggcggtggtacacaagtggtacataaatggtcgccatccgaaaattttagtctcagtcgttaagtatttggttgttgggtagttgctgtgtttgggcctatacagtcgctccgaacaggcggataatgaattttatcgggggcatggctatatggactgtaaccgcgttgcagtatcttctatcggaatttaacaaagcgacctgccaaaacatattggcaggttttgcaaatttactctgccgatgtcccgatcagcaacagtattgaatagtcggtttccgccagttttgcatccgtgccgcagccccagacgatattaacctgcggggcaaattcgtggatgacggttaaaaggctgcataggtcgtcgaaactaatctccgatgcgggatgatagcttacttttacaaccacgtcgaggtcggcttcgatgtgcagggcttccaattcggtgcggagttgttctgccaagacgggcattgcaccctcgaccgtaattagggcacaagatgccgcgctattcaaaatacggtcgaaatcgttccggacgatttgcaccatatcgtcttccgatgggctgaattggatgttaagatagtgtctgatttcttctttgtttttcatgtgattttgtttttgggtaatacattccggctgtgaatacgcaggtcgtttctgccgatatgtactggtagatcgccgttgcggcttgcttatttaagccctatacacaggcttgaaacaggcggttaatgaattttatcgagtttccggctacatgagccgtaatcgcatcgcagtatcttctgtcgggatttaacaaagcgacctgccgggttgcggcaggtcgggacaactaagaacggtcgggataaagactcagaaaggatgtggataacaacttataactatgtgctttatcctcgaccggaattatatacgagaaattaattttattcccaattaccaatatcattatcggcttcatctgtcgagccgaatttgatgccgggataacggtcgaaaacatttacttcttcatcaattagattgattatttcctgccggtatttaatcgtatcgaggaagagtttgtagggggcacgaacttctatgaaagggccggtacgattagaggatgtcttggtaaatccggtttccaagataaactcgttgtcggaattgggaatgtaacggagttgctcgatgtcgcatcttaattcggttggatttgcatgaagaaatctctccaattcgtcgaaatcttcggcataacgctgatattcggctctgaacgcacgctgagcggtgcggacatccttgatgcgttcgatgacctgtgctttgcgttcttttaattcgttttcaaaatggataggtgttgatatttggggactcatagtacttattgcagcaaatagaatcggcaatagagagatgattaatcctgctattgctctgcccttggggttaatgcggaggcctataatagaaaatattagtcccaataaccataaattccctattaagactggtaaaataagtgtgaaaaacagactcttatcgtttaatgaatttatgatgtacccttcgaaagaaaataatatgaacgacataaggactaatacaagtccggctgttccaatgcgattattttgtatttgagtctgttcattattgtctgagctaatagttgtattcatgggaaaagattataagttgaacgtaagaacgctgcggcatacactaaaggtgctattaatattcttcatgagagaggtaataatagacaaaacaagagccgattaagaatagtaacaacatgactgatgaaataattattcctgccgttgttagtttcgtttgacgataagttgctccaatgcaggaaataataagggatgctggcgatatgacaccacttccaagaattgaaaaaagagatagtataaatcctaatttacccatgttatacattgctttttctgtcgcttgggttgatgttaaatttgctgaaatattgtttgtgattctttgcatatagttaatttttttatatattacaataaaattgaggctataccggcaagggttccgaccagtgcaactaaaataatcaggtcgattattgaaatgataaagcccgtaatcgctaagcctcgcgggcttttgaatatgccgatgaaagacagtatgaatcccagaaaccaaaccacccagcctactcccgggaaccatgatagaatcagggcgataagagataaaacgaatccggcggttcctgtcccgttagattgacgaacgggctgctgaatgatgatcgtctggttatgatctgtcggtgatgtggttctcggattcgtggtcgggcagattggatgcccgcattttaggcacgacggggcgtaacgggatatttccgtcccgcaggccgggcaatgaatcaatagcggttctggttgtgaggtttcgactgtcggcaattcatccggtgcctgcggaacttgggacggagcagtgggcgaaataggctttttacgcaagtatcgaaacgtgaaaacgaataaaagaatgatgatgattgtaaatacaatgccgctcactccaccgaggtattcctgccatacaggtgagtaaaattcttccatagttttattattagatagtaaaggtagtgttacatggttgtttttctccaaagcgaagtcggggtttcttctccgttcatgtttgtagacgtaacttctccgatcttttcaatctgcaaatccctgctgttgtgaccgagatagatgcctatacggtttgcgatgattacattacgattccggatgtcgccttcgtccgcatgtgcgatcaacatacgttcgtaatagtctttgaaatcttgcggaaaaggattggtgacccggtgcgagtcaaaggtgggttcggcgatgttctcgtaaatgtacttgtacaacgcatcgttacctaattctttgagaatcgagtaggctgtaattttctccatgacggtaagtgtttgcgccacccagccccgacttggcatgattacaaaaagaaagtgtggagctgcccgttttattcgaatagaggttctggaatacctttgctgaaataaactgacacaagaccccacacctgtatagtatggggattaatctcgcataccaatacaagtgatgagtgccgtcgtttaccctcagcaaattgaattttccagattcctattcgaggttaaatcgaaacactttcaccaatatacgccgcttgcgcgacaagacaaaggtaaaaaatatttcgtaattgacgacacccatcggggccttgttgtgcaaatttcgccaaacatgctttcgggtattatctacgcagggatgcagatataataaaaaagctggagccttgaagggctccggcttcactcgcggcacgatggggttatttgaaagttatattatacctttgacaatgataaaagaaagtagctatatccacatcatcgtgatttttgatacaccagtcaaacatttcatcgcattcagtatgatcgtaatcgggatgccatttacttaccaagtggaaaagtcgtaacccttcttcgggcccaaattcactggcgagagcttgtccgatggatttccaaacggcacgtccaacagtgatatcaatctgttttttctgaattatttttatcagtgaatatgcccgttgttttgtgactacatccatttcggcgtttcgagccttcttccccctgcgcggcgcactgtatttgttcggcttgtaatacaagtacggaggagcatcagggttgaaataggggtgagggtcatagctggccacacgcagccttacgacatcgctgccactttcatcgacgattagtggcgtccgttcttgtatttcgtccacgagagcataaaagtgagctttatggcgttcaggataagctattcgaaagatgcagcataatccatcgcctccaacagatagcccagcatagcataaactgctgattctttctttcaacatatttttgaccaagttccatcgcccttttacacgggggttttgtttcccatcaatatcgatgcagatatagccgctatgaagatgttgaagcctctttttggcgcgtgtgtcgaatacaccggcaacggttacgcacggtatctcgaatttcttgattttggcgcgtatgtccggatctttagtgcctcgatattcgtctactatattttggtaggaggtcgttaataaaaatgtccataaatcgaccgttgcgacaggggttgtgctaactacgtttgcaaagagcgaaacttgaggcccaacaatgtcttctggaatcctaacaacggtgtttgtccttgagagtgtgagtttattgttttggttcattgcgtttgaaattatcattttatccgatggttgtgggtatgattttgttattcagtgttttgcgtattgacttgttgcctgtttcttgtatgtttctagtccggttattgctctgagaaataagacgggatgttttaagtcccgtcattatccgctttctcgtcatcatctttcccgccccaattactctcgacttttctatcatatttttgcgagttcacatccacctgcttccgccaactgacgaaagattgcataatacgtgttggtgtctttgtaggcggttccttctgatagaatgcataatccatcaatactctgaatgctcttaaatggagccgttccggcattaatttaatagattcgtaaaatgagatgaaacacacaaaggattctcggggtttttgtctccggcgcttcttgggagcttcctcctgtagttcgataaattcattcagttcgtcttcagaaatgtcggccagtgcttccaaagggttaaattctgttttcataaattttttaattattaagtttttttaattgttctttacagtattgcccgacggtggggattgaattctctttcatccagtcttcgatttcctgtcggatgaacaccaagcgccgtcccccgtgggcgggtctatgaaatgggatgagtcgttgatgtgtgaacttgtagatcgtggcctttgaatagcctgtaagtttaatcacatcattgatgcccataatttctggtggaggtgattccggcttattaggataagagttggggcgattgccgaagccgaggctcacgcagagttcgataaattgctttaccgagagtcccgcgatggggaaatcatccccgaattttgagaaagaattagtatgcataatcttaaaaaattaagttatgcactcctaatacgaatggatattttgacagtattttgattttattataaatattccttataaatattgattgtcaatattttgtgtatttttattttgaagattttatatcgtttttttatggattagacaaaaaatatgactggtgttcccagtcatattgtattgattataagatgtaatgtaggaaaagatactattggctgaagtttttttgctttttttatgcggtttttgtgtcgtttatataatttatcctgttatatgaattttatatcctgttatataaatctatgccgacgaaatattttttctaattctctgaaaatacatttgtcttttgggctatggttggcaacagttttaactttgtttgccatatgccagactgtgttataggagttgattttcaattcggtcatgagccatttaacagatacttttcgggggtaaaacgatattgcatagatgacatagctccatttaactaaatcgatgcgtgtcttgaaaaatattgtctcttgcaggatagaccattgtatactgcaatgatgacaaagaatattttttgaagcgtatttgcttctgctgtgggtgttgaatctttcgcatttagggcaatatgttctcttccaaatttcattgtaaattaggtcaaggatgtcgttttcagaacctactctttctgaaaagtcatcgtaatctactatgtcttcgtacattagaatccaaaataattttgcaacttgattatgccgtcctcatgcttttgtggatttttccttttcagctttctaatattgagtagcttccattgaaccgacggataatgctggaaatcttggtattccgatgcgtcccaatccggcgtcccgtcctcgaatccgagtaaaaatgctttgtcggtcggtgtcagatggtcgttgatatactcgaccagtcggcggcgggtcgcttcgtactgctcgtaggtgaacggcgttgaggacatgccctcaaattggttggtcagggcgtcgcgctggtcgttgaaattaggattaagggactccaagatcgggcggtcgcttcccagcaggcagaagatgaaaccgcgcttgatctggtcaaagtctttgatataatcgagcatcagacttacatcgaacaggtcgcgcgggtgctggcggtcgagtgccgccgtgatcttgccaccgtagagttgtgacagcggaacgatgcgggctctgcagaatacgccgaaatcttcttgggcgaggtcgcataagggcaattcgatgggcggtgcgataatgccgcgcttcacgtcgtttacctctactttgacgaaatgcccgttatgggtgcagatcaatttgttgggaacttcgcgtattgcaatgcccggtattgcagcctcgatctttgcctttatcgctttcagccgttctttgatatgggcgaggcttgcttcccgcggctcgacgggaatataggtcaggtcgatgtctaccgaatatcgcggcagattttgcacgaacagattgattgccgtgccgccgtgaacggcaaaacattcttccgtcgaaataatcgggatgatgcggagcaacagccgcacgcgctctttgtactcttgattaatcatttttcagttctgccggaatagtgatttggtatttcttatcgtaaacgcctcctttggcgattacccgcttgccactgccgaggtctattttgtcgaggttgagggccccgaaccacgcatgatgggccttttcggccataaagaggaacagccgcttcactttgacggaacggcactcctccaacagtcgttgcacattctttggcgggagtatcgacagcatttccatcacataatagaggtcggtaatgtcgtaatattgcggagcgaggtgcagacactccataaatgcccgttctggggtagagatcggcaactcgaaaaccccttgtcgggtggtggtgattccggtgtcggaattgaatatttcggtggtaaacagccggagcgtaactccccagtcgtattttctgaaccaaagcggtaaatactccttttgtggcgcagacagcgaaacggttggcctgcccatcgggaggtagtgcgaatatccgtgtatctccaatgccgacatggctccgattgtcagatgtttgtcagcctgtgtattgaggctgtacatggctccgtataatgtaggcgtatcgcccgtgcggatcattgcacccgtgcctatgggggtcagccaagcggattcgacgtatctgtgttgggtggaatgcggtatgttattttgcttcatccacgaggtcagatacacggctccagccggaacctcttgcagtaattggtttattttcgactcgttttttacgctcatagcgcaaatatacaaaaaatattaaaccattgtcggcttattacaaaacttttgccgcctcgttgattaccttgttgtcgaagctgtcgaggtaggtgttggtcgtctcaaggtcggcatgaccgagcatctgcgaaatgatttcgcgcgggattttattgtattgcaaggtcattgccattgtatgacggcttacatagctggtcaaatgataatcgatgccgagttcttcggccaacgatttcaaatatttctgatatttggcgtaacggcttcggatgtggttgtatagcttctcgcccgtatagccggaacaagtgatgatcggtaacaaataattttcgacggttggcgaggcagatttcagctgttcgatcaatccctgaatctccggcgtaatgtggattcggatggcagttgcgttcttttggtgcttgattttgttgcgtttgtaaacgatataattcccgtcagccagccgttgaatatgatcggtcgtaaggtaggccatatcgacgaacgacattccgtagcagtagtaagaaaaaagaaagagttgccgggcgtattcgttttggggattctgtgcgggcgtatctttgagtttttgcaagtcttgaggcgggaggtagcgtttctcggtcgcttcttccaacttggcaatctcgaagccgcctttgacgaaaggataggtcgcttccgaaccgacaccttctcgtttcgcttgattcaatatagcccgcaatgccttgaaataatatttgcgggtattgcccttgcaaccccgcttttgcaggaacgtatcgaaattgcgcacgtaacgcaggtcgatgtcggaaaacagccgttgactcagtttgccgtcgtaatatttgagcagtcgaagcgtttcgaaatagcatttggcgttgcccgtatgtccggtatcccttaatgtttggatgtgattttcgaggtatgcgcagaattttccctgcttggaggggttcaaaaatgtttcctcaaattggttcagtgtccagtcgatgccgtctatctcgaatttctcgataatctcgcgggcgcgggctttgactttgtccaaaaaagcattgtcctgaattcgtttcttattggcctcccgctgcttttcgcctttcagattccgttcgatggtaagtcgttcggccgaattgtcccaataggccggatcgacgtataatttcagactgatgcgcttgcgactgctgtttttagtgacgcataattggagaatgtgataccccattgaattgggtttgtatttccgtaaaacgatgcgaacagagtaggccattttccgatgtaaaatagatggtggtacaaaagtggtacaagaaaaatcgcaatagatgacaataaggcaaaatcgcaattctctgtacgtgatgtaaatatactaaaataaagttaattacttttatcggaaaaaataaatttctcctctggggggcgcgtggtcgcaagttcgaatcttgtcaccccgacttttcgaaaagccttgataatctgatgattgtcgaggctttcttgtttttgtatctgttcgtacgggtagggctgtgcgggcgggggaatacgattctgcggggaaaatacgttcttatatacaagggcggaagatgcgggcggtgcgggaaccccggctgaccgcagacgggaaatgtcaatttttttactatctttgtgacggattccgtatggcggccgtcgtttttttgctgtgaggccgccgattcttgccggctcgcctgtgggcggcagtttttgatatttgcccggaggaatgcccttttcccgggaatatcgtccgaatgcggaggaatttgcaggggagcctgcggttccgggtgtatctgtgattttattgcgccgtgccctttttatcgtacgctgacgaccgtaccggggacattgccgcccgcatccgaaaattataacgaaaaaataaacgatagtgcttatgaaacaaaggaaaatgctttcattcacgctttaccagctcgggctgtttttccgccaggagctgccgggacttgttgcccaggccgatgcgagccgcgatgccggggagttccgggcccggctcgaagagttcgtcgcccggcatgcggcggcgcagggcgaggcggcggaacagatccgcctgctgatcggctacgacgggcgggaggtgagcgaactttcgaccggtgagcagatgcccgtgcggacgctggaattgctgtggcagttcctcacggggcggctggagaacccggagatgcgttgcgacctgttcatcgacctgtttttccagttcaagcgccttgaggggctggagttgcagccgctcacgccgcagcgcgtccgtatccgcagcgatcgctggccaacggggctcgatcccgaggtggcggaggtgcgcgcccagaacagggagcgtatgctccacctcttggtgcagaagatcgagaaccgcaagtcgaccccttcgcggttccgtttcgaggaggggatgacctacgaggataaataccgtcaggtaggcgtctggtggggcgatttccggttccacctggcgatggccgtgaagagcccttcggagttgaaccggtttctgggcaactcgctctcggcggagaccatgtacctgctgtcgaaggcccgcaaaaaggggatgccgttcttcgccacgccctattacctctcgctgctggacatcaccggcaaagcgtacgacgacgaggcgatccgcagctatatcctctattcgccgcagctggtcgagacctacgggaatatccgcgcctgggagaaggaggacgttgtcgaggccggaaaacccaatgcggccgggtggctgctgcccgacgggcacaatatccaccgccgttatcccgaagtggcgatcctgatccccgatacgatggggcgtgcctgcggcgggttgtgcgcctcgtgccagcggatgtacgactttcagagcgaacggctcaatttcgagttcgagagcctgcgccccaaggagagctgggatcacaaactgcgccgcctgatggcttatttcgaggaggacacgcagctgcgcgacatcctcatcacgggcggcgacgccctgatgagccagaacaagacgctgcgcaatatcctcgaggcggtctaccgcatggcctgccgcaagcgcaaggccaaccaggcgcgtcccgacggtgaaaaatatgccgagttgcagcgcgtgcggctggggtcgcgcctgccggcttacctgccgatgcgcatcgacgaccagctggtggaggtgctgaaggagttccgggagaaggcctcggccgtcggcgtgaagcagttcgtcatccagacgcatttccagtcgccgctggaggtgacgcccgaggcgcgggaggctatccggaagatactttccgccgggtggctcatcaccaaccagctggtatataccgtcgcggcatcgcgccgcgggcataccacccggctgaggcaggtgctcaactcgctgggcgtggtctgttactataccttctcggtgaagggcttcggcgaaaactacaccgtcttcacgcccaacagccgctcgatgcaggagcagcaggaagagaagctcttcgggcggatgaccgctgagcagaccgcggaactggatgcggcgctgaccggcgagggcgacacggccgggcgcatccgccgcttcatgaagaaacaccggctgccgttcctggccaccgaccgcagtgtgctgaacctgccggccatcggcaagagcatgaccttccggctggtgggcatcacggccgaggggaagcgtatcctgcgtttcgaccacgaccgtacgcgccgccacagcccgatcatcgaccgtatgggcgagatctacatcgtggagaacaagtcggtggcggcctatctgcgccagttggagaagatgggcgaggacgcggaggattacgccagcatctggggttacacgcacggtcagaccgagccgcgtttcgggctgtacgtctaccccgacttcccgttcggggtgaccgaccgggtgagcaatctggagctggagtagttgccggtggaaaaagcaggggcccggccggatgcgctccgccgggccccgatatatttggatatatcagaaattcttattatctttgtgtaaagtataacagggccggtcgaagaaggatcactgacaaggatcgggccggaagaacagcacccgaattatgaaaccgtccgaacgattgcagtcgctcgatgccctgagggggttcgacatgctctttatcatggggttcgcctcgctcgtcgtcgccgtgtgcggcttgtggcccaacgctgtgaccgacagcattgccagccagatggggcatgccagctgggacggcttcacccaccacgatacgatctttccgctgttcctcttcattgccggggtgagcttccccttttcgctttccaagcagcgttcgctggggttgccgaccgggacgatctatgcaaagatcgtccgccgcgcgctgacgctggtgttgttgggggtggtttacaacgggttgttcaggctcgatttcgaaaacctgcgtattgccagcgtactggggcgtatcggccttgcatggggcatagccgcggtgctgtacctcaatttcggggtgaaggcgcgcattgcgatcgctgcagccatactggtcggttacggcctgttgtcggcgctggtggcggcacccgacgtcgcgggcgcagggccattgacccgggagggttgcctggcagggtatgtcgaccggctgctgttgccgggtaagttgtacggcaagacattcgaccccgaggggctgctgagtacggtgcccgccgtggtgacggccatgctgggcatgtttacgggggaattcgtgcggcggcaggacttgtcgggcggccgcaaggcgtcgtggatgattgcggcggccgtggcgctgctggtcgcagggctggctttcaacggggtggtgcctgtgaacaaatcgctgtggtcgagcacgttcgtatgtgtcgtggctgcctattcgctggcgatgttcgccctgttctactacctgatcgacgtcaggggatggcgccgctggacgctcttcttccgcgtcgtgggactcaattcgatcacgatctatctggcccagcgtatcgtgggcttcgggcgcatatccgatttcttcctcgggggcgtggcgtcgaaatgcccggaggcgcttgccgccgtggtcgacagtgccggctatgtggccgtctgctggctgtttctctatttcctttacagaaagaacgtctttctgaaggtgtagcctgcggattccgtcaggtgctgcgcgcaggcgcggctggcgcggagtttgcttcacgcccaaccgattgtataataaaaaatcattgctatgaataagacgattcaccgcgcacagacgcgcggacacgccaaccatggttggctcgatacctaccatacgttcagttttgccggatattacgacccccggcgaatccatttcggcgccctgcgggtgctcaacgacgatacggtcgccccgggcgaaggattcgggacgcatccccacgataacatggagatcgtgtcgattgcgctcgaaggtgcgcttcggcacggcgacagcatggggaacatgcaggagctgcgcccgggcgagatccaagtcatgtcggccgggacgggcattacgcacagcgaaatgaacgccagcgacacggagcccgtgaaattcctgcagatatgggtgttgaccgatgcggagaaccatacgccgcgttacaaccagatccggctggcgccggcaaagcgtaacgaattgaggacgatcgtggcccccgaaggccgcggtggcgaaaacacgggctggctccatcaggatgcctggttctcgacgctcgacctggacaaggggcatgacgttgaataccggatgcatacgcccgggaacggggcctatgtcttcgtgatcgaagggctggtcgaggtggacggcgaagtgctcggccgccgcgacggcatgggggtctgggataccgacgggttccgcatcgaggcttcggccgacgcacaggtgctcgtgatcgaggtgccgatgcggtaacgggcggatatataggtgaaagcctgctggtttccagcaggctttttttattgccgccgtgccgcaccggccgggcggaaacggaaatccccttccgcccggccgaagactgtgtatttttcgtatctttgtttgccggttccggtaaaatatcgttgaattcgtaaatgagatacgctatgaaaaattatttcgtcgcactcgccttcatggcggtgttactgcctgtggcctgtgcctgcggcacgcccgaacccgcccgcagcggggacggggatcccctgcccgggaaccccggggcaaagagctacaagaacccggttttcagggaattcctcgtggccgaccccacggtaatacgcgccgaggacgggaatttctacctctatgcgaccgagagcggaaagaacaacatccccatcctgcgctcgtccgacctggtgaactggacgaaggtcggcgaggtctttacggcggagaaccatccgcagataaccgacaaggccggggccaacctctgggcgccggacatcaacaagatcggcgacaggtatgtgctgtattattcccagccgggggagaacaacaagcacgccatcggcgtggcgtcgggcccctcgcctgtcgggccctttaccgaccacgggaaactgatcggcagcgacgagatcggggtcgatatttcgatcgaccagttctacatcgaggaggacggacacaagtacatgttctggggaagtttccggggcatctgggcgattgaacttgcggacgacgggttatcgctcaaacccggggccgggaagcgtaagatcgccggcgaccagtacgagggcacctacatccacaagcgggacggatactattacctgatcgtctcgacgggcgatttcatgaaggattaccatgtggtcgtcggccgcagccggtcgctgatggggccttatgtcgatcgtgcgggacgcgacatgctcggcgtgcaccacgaactggtcgtgggcaacggcaacgggtttgtcgccccggggcacaatgcggaattcgttaccgacgacaaggggcaggactggatgctgtaccatacccggctcgaggtgggcgggccgcgttacctgattctcgaccggatcgaatggaatgacgggtggcccgaggtgcgcgggcacgtacccgcccggagtgccgaagctcccgttttcgagtagcccggctggcaggccgtgcgatgtccgtgcgtgcggcgtccatgcctgtgacctgtctgcgccgtccgtacctgcgacctgcctgcggcatcgcggttgacgcggccggggcaggcgtattgccggcaggaagagagaatcccggcgggatcccacatgggttcccgccgggatttttacggatcggacagccccccccggatcagaactccgaggtgaagtggaagcggatgtccttgaaattctcctgcgccagcgccagcccgtagctcgtgtcggcgaggaagacgtcgcggccgtgcttgtcgacggccatgttggtgtgcttgcggcgcttgaaatcggccagctgcgcggcgttgtcgctctcgatccagcaggctttgtagatcgagatcggctcccagcggcaggcggcgttgtattcgtgttcgagtcggtactggatgacttcgaactggagcgccccgaccgtgccgatgatcttgcggccgttgagcgaggatacgaacagctgcgccacgccttcgtccatcagttggtcgacgcccttggcgagctgcttgaatttcagcgggtcggcgttctcgatgtagcggaactgctcgggggcgaacgacgggatgcccgtgaatttgagcttctcgccctcggtgaaggtgtcgccgatcttgaagttgcccgtgtcgtgcaggccgacgatgtcgcccgggtaggcgaagtcgatgaccgatttcttttcggccatgaaggccgtcggcgaggagaacttgagctgcttgccgctgcgcacgtgcaggtagttatggttgcgctcgaacgtcccggagcagattttcaggaaggcgatgcggtcgcggtggttgggatccatgttggcgtggatcttgaacacgaagcccgtcatcttcggctcggcgggctccacggtgcgggtcgcggtgggcgccgggcgcggcgagggggcgatgcggacgaagcattcgagcagttcgcgcacgccgaagttgttgaccgccgagccgaagaacacgggggccagctcgccgcgcaggtaggcctcgcggtcgaactcgtcgtagacgccttcgaccagctcgacgtccgagcgcagctgttcggcgaatttcgctccgatgtagctgtccagctccggcgacgcgaggtcggaaatctcggcggtctgggcgtcggcggtgagtttttcgtccgacgtgaaaagcgagaggttcttttcgtagaggttgtagaccccgcggaacgtggggccgttcgaaatggggaaggccagcggccgcacgcggatgcgcagttccttttccacctcgtccagcaggtcgaaaggctccttggaggggcggtcgagtttgttgatgaagacgatcaccggcgtcgaacgcatacggcacacctccatcagtttgcgggtttgcgactcgacgcccttggcgccgtcgatgacgatgatgaccgaatcgacggccgtcagcgtgcggtaggtgtcttcggcgaagtcctcgtggcccggggtgtcgaggatgttgatcttggtgcccttgtattcgaagcccatcacggccgtggcgaccgagatgccgcgctggcgctcgatctccatgaagtccgacgtggcgcctttcttgatcttgttgcttttgaccgccccggcgacgtggatggcaccgccgaagagcagcagcttctcggtgagggtggttttacccgcgtcggggtgggcgatgaccgcgaaggtgcggcggcgtgtgatttcttcctgtaatgtcatgtatttgttcgaatgtttctgccgggatccggcgcagccggtgccggcgactgctgttgccacggcttcgggccgtgtttgcaagcctggcccgccccaaatccctcccgggggagaggcttgtcgcatgcggccggaatatctcggtaattttaaacctttgttattctttcgggtagtcggcgttgtagtggcagccgaccgactccttgatctcgcggccctgtttgattaccaggtaggctacggcgatcatgttgcgcagctcgcacaattcgcggttgggcttggtcttgttatagagctcctcggtctcctgccagagtatctcgaggcggcgcatggcgcgtttgagcgagaggttcgagcggacgatgcccacgtagttggacaggatggtctgcatctcgcgcttggactggatgatcatcagcatctcctcggtgtgctgcgtgccttcgaagtcccagtcggggatgccctcctggatgtcgaccttggggagcagcgacgcagcgtggcgtgcggcctggtcggcatagaccaccgcttcgatcagcgagttggaagcgaggcggttggctccgtgcagccccgtgcaggaggtttcgcccagcgcgtagaggtgcctgatcgaggtctcgccgttggtgtcgaccttcaccccgccgcagcagtagtgcgccgcgggcgtcacgggaatccagtcgcgggtgatgtcgatgccgatcgaaaggcatttttcgtagatgttggggaagtggctgcggatggctccggggtctttgtgcgtgacgtcgaggtagacgaagtccgagccccgcttggtcatttcgcggtagatggcgcgggccaccacgtcgcgcggcgccagcgatttcatcgggtggtatttgtccatgaactcctcgccggaaggcaggcgcaggatggcaccgaaaccgcgcatggcttccgtaatgaggaagttgggtttctcgccggggttgtagagcgtcgtggggtggaactggatgaactccatgttctcggtgatggccttggcgcggtggcacatggcgatgccgtcgcccgtggcgacgaccgggttggaggtcgtggagtagatattgccgcagccgcccgtggcgacgacggtgaacttggcgagcatggtctcgatctcgttggtagcgaggttgagcacataggcgccgaagcaggccagcccgcgcgtatggcgcgtgacgaattcgcccaggtggtgctgcgtcaagaggtcgatggcgaaatggtgttccagcaccgtgatgccggggtgccggcgaaccgactcgaccagcgcccgttcgatctcggcgcccgtgaggtcttcgtggtggaggatgcggggttcggtatgcccgccctcgcggttcaactcgaaacgtccgtcgggagtcctgtcgaagcgcgtgccccattcgatcaggtcgcggatcagctccggggcccggcgcacgaccagtccgacggccttttcgtcgcatttgccggctccgcagaccaaggtgtcatggatatgtttttcgaatgtgtccggggcgtaggtcaccgagcagatgccgccttgtgcaaagttggtattgcactcgttcatttcgcccttcgtgacgatcgtgacatgcccgtgggccgcggccttgagcgcgaacgaaaggcccgctgcgccggaaccgataaccagaaagtcggttttcatagttttgtgagcaattatgcgacgcaaagttataaaaaatgcccggtaatcgggccttccgccgggaaaaacctgtgcaaaaacagggcgatccgctgtggatgcccgtttctgtcggctatatttccctccgcagcgggccatatccggattttttcctacttttgtcacgatacaaccctgattattctatgaaaaaattgctactggcctttgccgcaggcgtgtgtctgtccgcctgcgccacccacgatccaaaaatctcgatcgtaccttatcccaaccacctcgaacccgggcacgggacgttcgccgtcaagggcgaaggcgtcgtgtgcgacagccgtgccgacgagcggacgcagcgcgccgtggcggaattcgccgcgcagctggcgaaaacctccggcggggagaaccccgtgaccgtcgccgacgagcttcccgcctcgggcatccgcttcgtcctcgaccaaacgctgccggaagaggggtaccggctcgatgtcaccccgaagggcgtcgaagtccgtgcgtcgcgtttccccggctttttctacgccgtgcagagcctgcggcagatgctgcccgcggcggtttacgggacggagcctgcgcccggcgaggagtgggtgctgccgtgtgtgagcatcgaggatgccccgcgtttcgcttaccggggcatgcacctcgacgtggcgcgccatttcttttcggtcgaagaggtgaaacgctacctcgacgtgatgtcgatccacaagctcaaccgcttccactggcacctgaccgacgaccaggggtggcgcatcgagatcaaaaagtaccccgagctgacgaccgtgggcagcatccgcaagaaaaccatgatccgcaaggagtgggacaactacgacaatacgccctacggcggttattatacgcaggacgagatccgcgacatcgtggcgtatgcggccgaccgcgccattacggtgatccccgagatagacctgccgggccatatgctttcggcgctgaccgcttaccccgagttaggctgtacgggcggcccgtatgaggtgtggggccgttggggcgtggccgacgacgtgctgtgccccgggcaggagaagaccttcgaattcctggaggacgtgttggacgaggtggtcggcctgttcccgtcggagctgatccatatcggcggcgacgagtgcccgaaggtgcgctgggagaaatgcccccgctgccaggcgcgtatccgccagttggggctcagggacaaggacggctatacggccgaacactacctgcaggggtacgtgaccgaccgcatcgggaaatacctggccgaacgcggccggcgcatcatcggctgggacgagatactcgaaggacaggcgccgtcggacgccatcgtcatgtcgtggcgcggcagcgcgggcggcatcaaggccgcgaagctcggccacgacgtgatcatgacccccaattcgcatttttatttcgactactaccagtcgcccgacgccgatgccgaacccttcgggatcgggggctgcgtgaccatcgacaaagtctattcgttcgacccgatggccgatctgacacccgggcagcaggcgcatatcctcggcgtgcaggcaaacctctggacggagtacatcgcttctgacgaccacctggaatacatgctcctgccccgtctggcggcgctgagcgaggtgcagtggtgccagcccggggtgaaggactgggtgcgtttccgcgacgggttccgcatggacaggatttattcgcagatggggtacgcattcgccaaacatatcttcgggatcaagggatcgtatgccgtagacccgcagaagggcgccgtggtgatgaccctcaccacgcagggcgacgctccgatccactatacgctcgacggctcggaacccacggccgccagcccgcgttacacggggccggtcgagatcggcaagagcgcccgcttcagggcgacggcattgcgcgagggcggcgagaacgcttcctattcgcgggagttcgcattcagcaagtcgacggggcgccctgcggtgctcaataccaagcccaacgacagctataccttcgaaggggcttcgctgctggtcgacggttaccacagccgcccggtctttacgagcggtgcctggctggggtatctggacgagccgctcgacgtgaccatcgacatgggcggggagcagtcctatcggtcggtggagctggagacgctcgccgagaagggcgactggatattcccgccctcgtcggttacggtgtgggtttcggacaacgggacggattttaccgaggtggcctcggtcacggtgcccgaagcgaaagccggggatgccgacggcatcgggcgttaccggatgcagttccccgaaacgtcggcccgttacctgaaggtggtcgcgcagaatgccgctgcgatcccggcctggcacccgggcgccggcagcaagggattcctgtttgtggacgaaatcgtggtggaataatcgcggcgggtgcccgccgcagtgtccgggacattcggggcgtacctgtgcggccttcggggcgttgcccgggtggccggcaggacggatagcccgggcgtttggataagtttcggcaggggccgtgcggtattttcgtacggttcctgtcgttttgcaagggcggtttttcgggcgcaggtgtccgtccgatttaaaaaaaacgtacatttgtgcccatgattgaacgacatatcgacataaaccgattcgactacgacctgcccgacgggcggatcgccaaattcccgcttgcggagcggagctcttcgaagctgctcgtgtaccgtggcggggagatctcggaggcgcatttcgccgacatgggcgacgtgctgcccgccggccagctgctggtattcaacaacacgaaggtgatccgggcgcggatcatcatgcacaagccttcgggggcgcggatcgaggttttctgcctcgagccccacgacccggccgactacgagcgggcgttcgccgtcacgggaacctgccaatggtcgtgcatcgtgggcaacctcaagaaatggaaggagggctatgtggagatcaatttcgagcatgaaggccgtccggagcacctgcgggcatggattgcagagaaccgcggccgcgaacacaccgtgcgtttcgaatggtcggcggcgatgaccttcggacagctgctcgagtacctcggccggatcccgatcccgccctacctgaaccgcgagagcgagctgatcgactatacgcgctaccagaccgtctattcgaaattcgaagggtcggtggcggcgcctacggcggggctgcactttaccccggagctgatcgaggggatgaaggcgcgcggcttcgggttcgaggaggtgacgctgcacgtcggggcggggacgttcctgcccgtgaaggacgaggacgctgcgaagcatccgatgcacaccgagcatttcgaggtgcggcgtgcgaccatcgtggcgctgcttgccaagccgggcgcggtcacggccgtggggacgacctcggtgcggacgctcgaatcgcttccggcgctggcgtggcgtatccacacgggggttccgatcgacggcccgggccccgtggggcagtgggagttgtacgacattccggcggattacacggggcgcgatgcgctggaggagctgctcgcttatatggatgcgagggggctcgaccggatcaaggccgcgacgcaaatcatgatcgcgccgctggggtacgagttccgcatcgtgcgcaacatcatcaccaatttccaccagccgaagtcgacgctgctgctgctggtctcggcattcgcgggcgaagactggcggcgcatttacgactatgcgctctcgcatgatttccgtttcctgagctacggcgactcgtcggtgctgatgcgctgacgggacgggtgcaggacaggggcggacggatatacgaaaacagcaaatcggagaatcatatggcaatagaacgggtcagggcttatctggaacaatacggcgctgcggacagggtgctggagttcggcgtgtcgagcgccacggtcgagctggcggcgaaggcactggggtgcgaacccggccggatcgccaaatccctgtcgttcggcgtcggggaggggtatatcgtgatcgtgacggccggcgactgtaagatcgacaacgcgaaatacaaggcgaaattccatgccaaggcccggatgctgaccccgccggaggtggaggagcatatcggccatgccgtgggcggagtctgcccgttcggggtgaacgacggggtggcggtctatctggacgaatccctccggaggttcggaaccgttttcccggcatgcgggagcagcaacagcgccatcgaactcacggtcgcggagctggagcggtattcccggtgtgcggagtgggtggatgtctgcaaaaggattggacaatagcgcctcatgcggcgatacgtcggttcggccacacttctatccgcataatgaaaggcggcatccgattcccggcgccaacaagaatatggctgttcatccgtttccctttatttcggtaatatcggcagatacatgttctctttttttgcatttttactacctttgcagaagttattttcaacattgattatttatgaaaaaagccttgcgtcccaatgaacgaaccctgatttccttgctgcgaaagatcttggccgcattgggcaaaaccgtcgttgcactcatactgatcgctcttttggcagtctttgtgacaagtgtaagccccatatacgatttcagcgaacccaaaccattcagcggccctgacattttcaatccctacaagcgggctggggaagactcggcattttgttggaaaagggccaacttccacacgcatacgcgtgtgaagggcatcctgaacgaatgcgagtattggcccgcccaaaccgatgaagcctaccggaaattcggatatgacatcgtaacattctcgaatcacaatgaactgaccgtacatccgtacgactccttgttgcaggtcaatgtctatgagcacggcatcaatctgttcaagtatcacaaactggtgttcggatgcgatgaagtcaaccgcttcgaccatttgattccgcttttcgcttcccaaaaacaattccagttggatatgctcggggaagagtccgatttcatccagatgaaccatcccctgagaacgacgggcacgtcgaaaagccacatgcagaaactcggcggttacaggatcatggaactcgacagcggaaagagcaccgaaaacgaatattgggactgggccctcagtgccgggcattacagtttcgggctggccaacgacgacctgcactatcccgataagtccagccgtatcgccgtaaggtgcaatttcctatgttgtccgtcggcgaggtatgaagacataaaggaaacgcttctcggagggtgctattatgcgatgcgcgttcccgactacggacatggggactgggaggtgaaatacgccaaaaacagggaactgccgtcggtagagaagatcggcctcgacggcgaaacgatctacatcgccttgtcgcgccaggcggacagtatcaaggtgacggggcaggatcacaccaccctgtcgctggcccgaaactcgtccgaggccagctataccatgaccggcgacgacccctatgcacgcattaccgcctatttccccgacggcgaggtgatctacaccaatccgttcgcacgatacgatgcttccgaaatggaaaccccgtatacggttccgtcgcatacggtgaacatcccgttgacaatccttttcaactttatgcttcttgtcctgtgcgcgggagtgatccttacattttataaaacagttatcaaatggtaaagcctctgaaagaaaagaccaacctcacccgcatatcttcggtactcagcctgtttacgctcgtggcgttccactggccgttcttccggctggtgctcggcaacatcgaagggggcttcaatggcgtattgatcaccggagggctgggcgtgctgatgttcgcgctcaattttctcgtctattacctcgtgctctttctcgggcgcttcgtcggaaagtgcatccttgccttcacattcataggcaatgccataagcctctatttcataaatacataccaggtgctcatcacggacaagatgatggggaacgtattcaacacccggtattcggaggcttccggattcttctcatggtctgccgtatggtatctcctcttcttgggggtggttccatgcatctacatttttgcaaggcggttcgactacggaagctggaagcgttttttcgcccgcacgggcatcgcattggcggtttctttggccatagcgctgatcaatatgcaaaactggccgtggatcgaccgcaacgcgcccaagctcggcagtctggtcatgccgtggtcgtatacggtcaattccgtacgctactataattccgtaaagaagcagaaccggaaagagattcccctgcccgacgcgaagatcgtttccgacagcaaggatgtatgcgtgctgataataggagaatccgccagaagggagaatttctcattatacggatacggcaagccgaccaatccgcttctggagaaagacagtgtgaccgcactgattgcagatgcggctgcgacctataccacggcaggcgtgaaggccattctcgaccataagccgtccaacaaactttacgaaatccttccgaactatctcaaccgcagcggcgtggatgtggtatggcgcagcaacaattggggagagcctcccgtacacatcgacaaattctacaagataaaggatatcaaatcattgcacccggaagccgacgacaggtacgacggcattctgctcgcaggcctccgcgaagagatactctccgggagcaaggacaagatgctcgtcgtactccataccagcacgagccacggccccacgtactataagaaatacccgccggagttcgaggtgttcagccccgtatgcactacggtggagatgtccaaagcggatccgaaggagctgatgaatgcctacgacaacaccatcgtctacacggattatctcattcattccgtaatagaaattcttcgcgggattccccaaaggcgcagttgcgtgatcttcgtatccgaccacggagagtccctcggcgaagggaatctgtatatgcacggcgtgcccatacttgtcgcgccgaaggaacagatcgagatcccgttcatcgtgtggacatcggatgaagcgctggaaatagatccggagaaaaaggtcgggcagtaccatgtctttcacagcgtcctgtcgttcctcgggatcgacagccctgtctatgacgaatcgttggatattttcaggcagcccgaaaaagataaaaactaaagcgtggaatctttcgtgcgggcaaccgtccgacagaaatcgctcgatatgtgatatttacatatcgagcggttttttaatgtgccccgagccgggcgaacagttccaggtgtgcgtcgacatagcgggcgagcgtttcggtcacctcctcttccatttcgccgaactcctcctccagttcgtcgaacgcttcgtactgctcgtacatggccatgaactcctcgtcggtgcgctccctttcgaggtcttcgcggtgggcgtcgtagatttttttcgcggcgtataccagtttcgagaaccgttccgcgccccacaggcgcattaccctggcgaacgggttgccgaagatgtaggccccgtaaccgttctggataagctggcagaacccgccttcggtcacttcgtcgcggaagatccggtaggcaagcagcgaatgctgttcgccgttgagccgggagatcgtctcggccgtggggtcgccgccgagagcctcgcggtatttgtcggtaaaggcccggaggaatgcgtccatcccttcggcggcagccgcctgcagggccgtgtctgtaatttcgatcaaagtcgtcgtcgtttttagtccgtagtattttcgggagcctccccggagggcgtgttatgcttccggttcgggggtgtagctgcgcagggcgagtttcttgacccagaccacgaagccgcccgtgaggatgaggttcagcaccagcgtgagcaccgagatgatgagcgccgggccgccgaggctgtatccgagggcgatgaagattacgcctgcgcccacttcgccgcgggtgaacatgccgatcgagagcgccaggcgctcgctgaccttgcggtcgcggtagaagaagagcggcacaagcttgcccaggttcgaaagcacggataccgccacgacatgcaggaggagggtgccccacggcatcatgggctgcgatcccgtgaccgaagcggcggccgcggtgtcggccggggcgcccgtgacgagcggcatgctgaggcctaccagcagcatgaagagaaacgatatgccggtggagacgcgttgctccgcaggtgtgtcgatgtgcttgtgtttcatgagcatgcccacgacgaaagccgggagcagcacttcgatatggatgctgttttcggggccgtagagcttcgccgtggcgatgtagaccgcctgcgtcagggcgcagaccacgacggccagcccgaggatggttttccagtcctgccgtacgttccaccgcgcctgccagcgccagccggcggccagcagcacgacgacgatggcgatgatggcgaacatctgccatttgaggccgatcatcaggatttgcagggggatcatcagcaggatggtgtccaggtcgtcgaaaatcgccagcacctgtatctttttgtatatccagctttttttgaggctcagcgccgcgagcatcgtgaagaggatgccggccgaggtcggggctgcgaaacggctcagcagcaggttttccttccaggcttcgccgctgccccacagcgggggcggcagcaggacgaaaatatagtagagtacgatgagtatccagggcagcgccgcggtggccatggcgatgaagtagtcggccgtgtaggagcgccagcgggatttgtcgatctcgaattcgcgccccacgttgatcatgatgaaccccaggcagacgtaaagcagggtgtcggagcaggctttgaagcttgcgtatcctgcaccgagcgcccccgggaggagttgggagatgacgagtcccagcatcaggaacaaggagaaggagaggacttttcgcattaattgatagttgtttaggggtatatggggtgcattcgggggcaaagataataatttatgggattcccccgaaacccgaggcaccgttcgtgaaaaaaataacaattaggaaacctcaattcacaattattttgtacctttgcggtgcaaaaaaggaagtcattatttcaaaccataaattcaaacgtttacaactatgcagattgtagagattcacgcaagggaaatcctcgactcgcgaggcaatccgaccatcgaggtcgaagttcgcaccgtttcgggtgcattcggacgcgcagccgttccgagcggcgcatcgacgggcgagcacgaagcgctcgagctccgcgacggcgacaagggccgttacctgggcaagggcgtactgaacgccgtcaagaatgtcaacgaggtgatcgccccggccatcatcggcatgaacgttgccgaccaggtgggtatcgacaaggccatgatcgcgctcgacggtacgcctaccaagtcgaagctcggcgcaaacgccatcctcggcgtgtcgctggccgttgcacgtgccgctgccgactatttcggcatgccgctctaccgctatatcggcggcgcgaacgccaagacgctgcccgtcccgatgatgaacatcatcaacggcggttcgcactcggacgccccgatcgcattccaggagttcatgatccgtcccgtgggtgcccccacgttcaaggaggctatccgcatgggcgccgaggtattccacaacctgaagaaggtgctccacaagcgcaacctttcgacggcggtcggtgacgagggcggtttcgctcccgcgctgaacggtacggaggacgctatcgagtcgatcctcgaggcaatcaagatggccggttacaagcccggccgcaaatgcgaaggcggtgacgtgtcgatcggcatagactgcgcttcgtcggagttctacgccgacggcgtgtacgactacaccaagttcgaaggcgagaagggtgccaagcgcagctcgaaggagcaggtagagtacctcaagtcgctcgtagcgaaataccccatcgactcgatcgaggacggtatgtcggagaacgactgggaaggctggcagctgctgaccgccgagatcggcgacaaatgccagctcgtgggcgacgacctgttcgtgaccaacgtagatttcctgaagaagggtatcgagaccggctgcgccaactcgatcctgatcaaggtaaaccagatcggtacgctgaccgagacgctcgacgccatcgagatggcccaccgtgcaggttacacgtcggttacgtcgcaccgttcgggcgagaccgaggattcgacgatcgcagacatcgccgtggcaaccaactcgggtcagatcaagaccggttcggcatcgcgttcggatcgtatggccaagtacaaccagctgctgcgcatcgaggaggagctcggtgacgaggcgatctacggttacacgaaggtctaccgcaagtaatttgcgacgggcggccgctcgtgccgcatgattttccccgggtggcatcgccgcccggggatttttttgccccggcagggcagccctcgggggcggggacgggggattccgccgccgttttgcagggccggaaacgggcgaagcctgtgtcgcaaggtgcggcacaggcttcgcgtcccttcgggcggtatcccggtgcgggcggttattcgtcggactgttcgacgaagaactcctgcccgccgttttcatcgtccttgacgacgatgctgccgtcggcattgatgaaatagaagtagagttcttcgatcacggcgtcggacggaaggccgaagaaatccttcgggtagaggtatttctcgaaacgggagctgatcagttccatgcggttgcgcgggactgcggccgagacctcggctttctgcccgccgtcatggattgccgtgccgcagagatatacctccccggcgtcttttagtgccgtgcctccgtgcgagaaggtgatgccgaagacgtcgccgtagcggaataccgagggcgtggtggtaaacacctggttgtaggtttcgatgggcttgaatgcctcggcgaaacgctgttcgtcgcgtttgaggccgaacgtgtcgtagcaatacgagtaacccagttcgcaggtcaggggaacggcgccggtcttcattttgatcctgacgtcggcatgtacgtcggcggtctcgacctcctgtccgtccacttcgatcttgtcgtcgaatatgaaggtggtcgacgaacgccatacgacccactccattgccgtttgggggtcgttgccgccgcggccgatgacgctcatgaaggagtccgcccacgaaagaccgttcttggggtctttctcctctgcgggcatcagggtgagttgttcgttcacgacttcgggctggtgctggatcgcgttgtagtccttggtggtcaaatagagcgtggcattgtcgcggaggttccatgccttgggggccaatacggcgaatacgacctttcccgagccgtcttcgcccggcgagacccggagctgggccgtcacttcgatttccgagtcggtcagggcccggcccggctggatgatgccgtcgaattcgaggcaggcgactacgagcagcggcagcgcggcgatgcacgccgcggagagtattttatgtttgttgagttttttcatggtcggggaattttagaggctcttgaatttgtatttgtatgtcaggagtttgctgtccagttggaactgggtcgtaaagccgtccgcgtcgaaggtggcgatgaccgtgtccgaacctttgacccgcagcacgttggggatgacgttgctgtccagcacacactggatggggccttcggacagcgcttcggggaacggtacgaaagggatgtcgccgttgtcgaacgtgacggtggttgcgagcggcgacacgttgagcgtcatgcgcagcgaagggaaatagtccagtttgccgtagatgtcggtgccgttcggattctcgggcgcgcacagcagcaccttgtcgagccggtaggcgacggtgtaggtgtcggggtcgtctccttcgggcggcgtgttgtcgtccggcttttcgaccgggatgtaggggagggttgtctcttcgtcgcatccggagaatgcgcacacgaagagcgcggcggtaaggatgattgcgtattttttcataaaatgatgggtttattagctgttcggttgaatcggatgtttcgggtcggcgggccgatccggtgtgcaacgggggaattccggtgtctgttcattgcgtcataggcaaaagcggtttttagggttcgtttatgggtcggtggcggtttttcgtatcgtcggctggttttcgtccgtacgtgtttttttcggtcatcgcccttcgttttgcggggcgaggtcgaagaccagccggtggcggccgcttgcgatcttcgtcccgggcgattgcggggccagcctgcggccgtcgagccgcccccggcaggcgccggcgggtgtgatcgccgtggccgtgacgcccgggggcagggtgacgtcgatccggagttcgccgtccgcgatctcccagcccaggtcgatccggccatagggggtttccttgccgatccggcaccactcaaccccttcgggaatctgggggtcgatgaatacatgctcgtagccggggtggctgctgtccgtgcgcaggccgccgagggcctggtagaaccacgtgccgatgccgttgtagcagttgtgcacgcgactgcgttcgccgctccaatactcccaggtggccgtcgcaccgtggtcgatcatatgcaggtagcccgggtagccgcgctgcttgagcatccggtagatgaattcggggttgtgcgatctgaccgcccagcgggtgatgaccggtacgccgaccagtccgccgccgatatgatccttcatcacgtcgtgcgtcgatcggaaaagccgttgttccacgccggcgcggagcgaatcgggcgtggcgcccaccagcatcgggtaggtcatgtcgagctgcgagccggtggcgtaagtttgcgtcgccgggtcgtagaaccgggcgtggatcgtgcggttgagcgcctcgcgccgcgcttcgaatgcggccgcctcgtcgtcgtgccccgtgagccgggccatctgtgccatcctggcgtagcagtcgctgacaaagcagttgtttaccagcgacaccgaagcctcgctgcctgtgtcgaccccgtgcggggcgagccagtcgccgaggaaccactcccggtaaggcgtgtcgggccagcgggtcagcaagccgtctttcatgtaccgttcgacatagcccatccattcccgcatggcagggtagtggcggtcgaccagcgtccggtcgccgtagttgagccacgtttgccagggggccatgacgatgaacccgcaccagtaggggccgccgcctcccgcaccggcgttgggggctacgtgcggcaggctgcccccggggcgcatggcgtcgtcccatgcctgcacccagttgcggtagagcggggccgcaccgcagagggtttgcaggatctcggtggaagagttaccgtcgccgccgtatccggcgcgttcgaggtgggggcagtcgaccatgtacccgttgtaggccaggcagcgcagcgtgtgcgcgatcatgtcgtggatggcgttcaggtcgctatccgacgaagtgaacgtcgcttcgggccggtagtcggtgtggatggcgagcgcccggaaatcctcccggcggggcctctgcgccagtccgcgcacctcggcgtaacggaaagcatggtggttgaacttgttgcagaaccgctcccggccgtcgccgcgggcgatgtaggtgtcgcgctgccgctggtcgatgaggttgccgtcgccgtccgtctcgtcgctgtattcgatctcgacgcgcgccccgtccggaagtcccgagaaatgagcctccagccagccggtgacgaccttgccgaagtcgatccgccatacgccgggtgccgcctcgtccagcacgcgggcggtcagccgctcctggatgcggtcgggctcgaccatttgcggcgtcgcccggtgcccgggcttccgggccgtgattaccggctgccatgccagcgcgtccaggtcggagggggacatcgagcgcgggttgcgccgggcgtcgatctcttcgcctccgaagtcgagggcgttccacgaccccgtgtcgcggtagccgctcagcgcggcacgccatgcggtgtccgtgcggcagacggtctgccaggtgtttgcggtgcctatgtccagttgtgcccgcacaagcggttcggtgtagggttcgtcgggctgccagcgtccgaacgtgccgcgcttgtaccaaccctgcccgagccagatcaccagctcgttgtcgccttcgagcaggtagggacggacatcgtaggtcacccacagcgagcgtttgtcgagctgcgagagggcgggggcgaggcaggcgtcgccgactttgcggccgttgacccatatttcgtggtatcccagcgaattgacgtgcagcaacgcttcgtctccgcatgccgggagggtgaatgcccggcgcaggagcacggccgtggcgcccgattccgcgcagccgatgaattcacccgagacggatgccgggtcggtcaggccgatgccgaagcgggcgacgggggagacggctttccggttgcccttttcggtgcgggcggtgacgcgccaccagcattgcgtccgggccgtcagcggaagcccctcgtaggcgactcccaccgaacgcttcgaccgtacccagcccgagtcccacaagtcggcgtccccggccagcagccgcaggctgtccgaggcaacctcgatccggtagctgcgctgggcatcgtcctggcgcccggagcggagctgccacccgaagcggggtgtcgccgtgtcgatggcgagcggatcggtcagcccttcgcaggtcagccgccgcaggcagggctttgcgccgtgcccggcattgccggccggaccggccgccaggaggcaggtgccggaaaggagcccgggcagcaggagcaggtatagcagggttcttttcatgggttcgaaattttgcgctgtcgttttcagcggttgtaagcctcggcccgaaccgtgtagcggtcgtcgggaagcaggccggcatcgaattcgaagtctatctgccggctttcgccctgcaggagcgtgaagtagttgtcgtcggccacgtagggcaggatgcgctcgccgtcggatcggcggtagggctgcacgtgcacggcgaaggccaccgaacgtccgacgttcctgactgtcgtgcggatgaccttgcggccgcctgcggcggtcagctgcgaacgtacctgcagcttggcaggggcgagcgtgttgagcgccgtgtagtcgccgcggcgggtcgcacgccagtagaagttgtccgagagcaggcgcccgtcgcggtcggtgagctccagccggatgaaatgcacgggcgagagtttcggcgctttcgcgtcgcggcggtagacttccatttcatagagcgagtagccccattgcgtggcacgccggagtccgagcattctgacgtagcgggcctgctgcaacggcagcgggatcgtctgttcgccgccctgcgcgtcctgcgtttcatagacgtcgcgccacgtgcggccgtcgtccgagagttgcagtttgtaggctgcggcgtgggcgtcctcccagcggagcacgacttcggtgaaggcgcggcgctcgcccaggtcgacctcgatccactggtcgtcgctgtactcgctcgcccagcggctcgaatcgttgccgtcggtgagagccccggcacctgcgccgtcgggcgatgaggaggatgctttcacgggccggttgcgggccaggttgccctccgagaaattcaggtcgaacaggctgcgggccgtattggccgcgagcgagaccctgagctgctgcgtgaattgcggcaggagccgcccgtcgaggtcgtagacccgtgctgtggccgtcgcttcgagcggttcgcgcgtcgtattgaccgccttgaccgaattgtcggcatggctccactggatatgcaccggttcgcacgccttgcgtatgccccagtaggcacccgtcgggtcgaggtaatagtcgtaggtctgccatacgagcgacgggtaggccggctggctcatccaggtcatgatgcccgtggcgtcgtcccacatgtgatgctgccagccctcgtacatggctttgttgacctccaggttgagcagctgcgccttgcggcagaaatcctcgatcccgtctgcctcgccgtagttttcggccacggtctcgaaatatttgtccggggcggcgttggccgccgacttgccgaagaaatgtttgtcccacatgtcgttgcggggccaccacgactcctcgggcatgaatttgcgaaaactctcgagggtcgtgaataccgccgtgccgatttcggtgcggaaaccccatgccgggcggcctttgtaaccgtagggcatcgggtaggcagcgaagtaccagccggggtggaaattggcccacggcccgcttcccgaaagtccctgcgcattggatatggactggtagaggcggtcgccgccgtcgtagtgggcgacgtcgccgcgcagccagtcgtcgagcggggcctgcggtacgccttcgttgtcgccgcaccagacggcgatcgaaggatggttgcgcagtcgcttgatcttctccacggcgttctgctggaaggcccccaggtcgtgcggcaggttggggtgcgagttgagccagaagtcgtcccataccatgatgccgtggcggtcgcaggcatcgtagaactcttcgtcggtcgtcgagccgatccagttgcggatcatgttgaaatgcatgtgccggtggagtgcgacgcgggtgtcgtactcctcgccgcggcagcggagcagccattcgctcatgccccagttgccacccttgacatagaccggttcgccgttgatcttcaggcggaagatgccgtcgtgccactcgtagccgtattcgcggatgccgaacgttactgtccgtgcgtccgattgccgcccgtcggtttcgaacaccaggcggcaggtgtacaacgcggggtcgcccatgccgttgggccaccagagctgcggatgctctacggccaggccgggaacctcgcgctccgtgagccggatcgtccgccgctcgcccgcttcgaggcggacggggtgcgagaaggcgatgcctccgggacggatctcgccccgcagcacgccctcgcaggccttgtcagagcggttctccacgtcggtaaggagttcgaccttcgcatgttcgcggtcgggaaccttcgtgcgcacccacggttcgacgaggcgtacgtcgcccgagagagacaggtagacatcgtcggtgatgccgcttagcaacccgggggcatagggcatccagtcccacccggcgctggagatataggtcgggctgcggaaattgggcacggggtatcctacccattcgacctcgacttcgaggcggttctccccatcgggtgccacgagccgggtgatgtcgtagtcccccggctgcatgaagccgtcgaggtgccccaactgatggccgttgaggcggacggtacccttgcggttcaccccttcgaagcggagccacagggtgcggccttcgccgaccgggggcgttgggaagagccccgtgtagcggaaattgcggtcgtagcggctcttgtccgtgcggtaggcgttgtcgccgaaattggggtctgcttccacgccggccgcaacgtacgacgcgaagacgcagccgggcacgatggccgggacggagggcagggcgtcgccttccgacggccgtacctcccaacggatatgtctgctgcggctgtcgagcgggatgcgttcctgtgcgctgacgccggcggcgagcagcgaaaggcagagtgcgaaaattcgtttcatcatggcgtgcgtttttttcggaagggggagggtgtgcactccgctccggcgggggaacggagtgcgcgcggatcgctattcctccgttcccgtgccggaatcgtcgtccgagtcgtaaacgtgttcccagttatatacgcggaagaagtagggccggtagaaatcggcgctgccgacgcggttgaaattgtcccagaagttggccggatcgctgttggtcgagaataccagctcgccctggcgcgaaagcgccgggtggaggttgatcatgtaccagcgctggtggtagggactgcccagcttgtcgagcgtcgcgggcagcgtgaagagcagcgtccggtcggtgaaggggccgtaaggcgtctggctgcggaagaggtagatgtcgcggccgaaggggaaggcctccatgcacatgtagtagacgccgtctttttcgaagacccacggcatcgaacccgattcggccgtgatgtaggaacgttccatctcctcgttgctcggcacggagctctgccaatggtagtcgccgctcaggtcgcggatgtagtacgaccacgggctgcccaggtcgagcgtctcggtgcgggccaccagcacgcgcgaaacgaggttcacctgtttggtcgtatagaggtagatatgtcccccttcggtgtcttcgaacatggtcgagccgtaacccaggccgtcggatttgaaattgtagtcggtcgaaagcaccgacatgtattgcccgtcgcccggctcgccttcgaggctgtactcgcgcaggcatccgtcgatgtttttcagcgacccgggttccacgcccgtccagagcatttgcaggatctttccgtgcgcggggtcgtcatatacgacggcatcgccggcccagtagcagtagtcctggtcgatttcgcctttctggatctcggcatcggagagggaggctttcggatgacggatgtgggtgcgggcctggtagtagcgttcgcccgaggggttgtccgtctgcacgtagtcggccagccataccaggtcgtcgtcgctctcctgtccggaggcgatcgtcgcccctttctggatcatcaggctgttgcgcgggaagctgcaactgccccgggcgcgggtcttgccgtccaccacgccgtagaaactgtcgttgaacgaccagaagacatggccgccgggcagtgccgtggtgagcacgccgtcgccgccgttccagcccagcgtacgggtgaagagggcatcgtatttcttgtccttgtagacgaagacgcggggattctgccctccctcgtcgggcatctgtaccaaattccacgacgggtcgatggcgggcggaacgggggccggggtaacttcaggcgcctcgtcgtcggggatcgccgggttgtcgaagtcgttgcacgcggccagggagcccgtacacaggcagaatatgcagaatgctatgatatttcttttcatggttcgttgcgataaggattagtattgggagcgggtcatcgtctcgcgtacttcgtgccaggtattcccgctttcggtggcgagctggtaacggtagtagaggtagaacgtgccggtcgcagggtcgtaggtagagtcgttgagcggcgaggccgagacccggatggcatcctggctgtcgagatagggggttatggagactcgctgcatgggtacgacctcgtccgtgatttcgccttcgacgtagacggggacgttcacccacgattcggggtcgaccgtcacgcgcaggctgttgttgcgggtcgtcaccttgtcgttggcggccgtggcgcccgggaggatgcgcaccgagcgctcacccacggggatgaccagcttcgaggagttgatcgcctggcgccgggtgttcgagccgaagatgttgtcgacgatccagccggtctgcgtggtgccggtcatggtgtagtaggtgctgctcttggtcgtggcgtagtcgttcctgcgctggatctcgaaaagtacgaaattcttggtggccgagggcatacaggacgatacggactcgatgcgcagcggaatgaaataggtctggtcggggagcagctcgtctaccctgacgttgatcgggaggctcgccgaacagctgccggcctccatctcgacgctcatggggtcgatcgtatagtattcggcgggaagttccatcgcgtattcctcgaacttcgtgtcgaaattgcgtttgttgtactcgccgatcgcctcgaagtccagcccgagtttgacggtgacgttctggtcgagccccgtcgtgccgctggcatagatggccagctctccctggaagcccttctcgccgtattcgaactcctgcccgaggatgttgttttcgccgctgacaatgaatatctccttgcggtaaagctcctccttgtaatactccatttcacaggagcagaggaaggcggccgcggcggcgagtatcgttattttgctgaatgctttcatcttctgaattttttggaattgactatttctcccagcccgggttctgatccaggctcggtactttgcgcagttcgttgcggtgcagcggcatgaacatgtacttggacttgaatgtccgttcgcggatcgtacggtacgagatgaccgtcggggcgtagaatccctcccattttccggcttcgacgttcaggcccgtcagcggctcgcgttccagttcctcgaaaatgccccagcggcagatgtcgtagtagcggcggttttcgtggaggaactcgaccatgcgttcgcgccggatcagctcgttgaaactggtggcgtccaccagttcgccggcgtcggcgcccgggagcccggcgcggtaacgcacctggttgaaagccccggccatggcggtcaggtcgcgcgagtagctttggccgttgacctcgtgggtcttcgtcaggttgttcagcgcctcggcgtaggagagcaggatttcggcgtagcggatcagcgggaaggtcttctgaaccgtgcgggcgttgctgcccgtacgcgcatcgcgcgggtggacgtacttgtagcaggtgtatcccgtcaggttgtagatgttggtcacgcccgcctggtttttgccggcattggcgccattgtagtactcgacgatcttgttccgcatctcttccgaggtcgtagactgcatctgccacagggtgcccgagaaaccgatgctcgcgtagaaccgcggctcgcggttgtcataggccttgtaggtgccgccgggcagggtgtagttcttcgatagctgcttgtcggctgcggtgacgcaggtctggtcgtagggacgatcctcgtaggggtactcggcgctcgcgttgttgatgtcgcggccgtcggccatgcggtaggcgtcgacgatgcgttgcgggatgctgatcgaactgttgccgcccaacttgagcgggaatacgacgtcctgctggtcggtgatgttctgcgtcgtgccccagatcagctccgggttggtcacgttcgtcgtttcgccggtgaacatttccgagtaggaacggaaggggtcgatgccgcccgcacccgcagggaagggatcggaggggacgttcgagggcaggggcagggtgtattcgtcggccggcaccgtatgcaggcggtagatgcccaggtcgatgacacgcttggccgcggcggctgccacggcccacttgctttcgtcgtaggtctgggagatgtagtgcaccccgtcggatttacgcttgaaagccccgaaataacggcgtgcggcggctccgccgttgaaaagcgggctcgcggcctgcaggcgcaggcgtgcgaccagcgccagcgcggcgcctttggtcgggctgccaaagagatccaacggctgctcggtttcgaggctttccgcagcggcttcgagctcggagcagatgtaatccacgcattcgtcgtaggtgctgcgctcggcctggtaatagtcgggcgtttcgttggtgttgagaacctggtcgcctacgaggatcatgggaccctggttctggagtatccagtagtaggcataagcccgcaggaagcgtgcgcgtgcacggaactccattttgtcgaaggcgttcatgtcgggcacctcgtcgatgtggggcaggatggtgttcaccttgcggatgaccttgtagcagttgggccagacattgaaattccagtcccagccgcccgtctcggtgtaggtgatcttgtcggtggtcagctccgtgccggggaaggagacgtccaggatgccgttgtagaatgtcccgcaactgacggcctcgtcagacccggtggcgccggggacgctgcaccagtagtagatgcggccctctttgggcagctggttcaccgcaccgttgaaatagcgctcgatgttgtattggctctcgaagatacgctcttcggagaaggtgtcctcgaagtagtcgtccacgttcaggaagttgcacgacgcggtgagcaggccgaccagcgcgaggggtatgatgaatgattttttcatggtagtttatgttcttaggagagattcgggttagaagttcaggtaaatctgcagcgagaagcggcgcgggatcgggtaggcgtgcccggtctgcatggcctgctcggggtcgaaaatctccacgccgtcccataccgcgaggttctcgcacatgatctggaagtcgatggattgcaggccgagcgctttgcgcagccccggcgtgtgcaggttgtagttcaggctcagctcctgcaggcgcagatagcgggcattgcctttccagaaggtcgagggtttggtgttgttggcgttgttgccgtaggaaaggcgcgggaaccgcgcattggggttctcggtcgcccggttgcccgagtagtcggccgaagtccagcggttggccggattgtaggccagggccagtacgttgcccttgtatccgccgttgaagggaatgtaaccgtcgaatttcgagccgtccttgtccccgtagaggaaatagttgttgcccgtacctttgaacaggacgttgagcgtccagttcttgtagcggacttcggcgccgaatccgtacatgaactgcgggatgccggaataggcgaacaggggcaccttgtcgtcgtcggtgatcacgccgtcgccgttcacgtccttgtacttgatgtcgcccgggcgtaccgtgccgaactgctcggggctcatgtccacgtcctgctgatctttgaagagtcccagggagatgaatccccgctgcacgtcgttcgagaacccggtcttgctcaggtagggataaggctgcgtggcctcttcccagttgttgatcttgttcttcgagagcgtgaagttaccgcgcagcgtgaagtggaagtttttgccgaggggctggaaatattcgaagtttccgtcgccgccccagctggtcatgctgccgacgttcccgtagggcatgctgatgacgcccacgtagtccggaatctgggcgcgttcctggaagatgccctcacggcggtcgcggaaatagtccaccgtcatggtgaagcggtcgccgaagaggtggagatccataccgatgtcgaatttcttggctttctcccacgccaggttgtcagcgcccacgcggttctcggtcagtacgcccgaaccgccccacggcgtgccgtcggtcttctcttcgatgatcgtcaggtaggggaagcgcacgctggaaatccggtcgttacccaccataccgtacgaggcgcggatcttcatgaagtcgatccacttgatccgcttcatgaattcgtactgcgtgggaacccagcccacggccacggccgggaagaatccgtactgccggccgctctggaagttctccgaaccgttcaggccgaagttcacgtcgaggaaataggtatccttgaagccgtaggtgaagcgccccgagaggctctggtaacgccttgcgatggcgttcatcgaactgtcggcacccgattcggtcgtgctttccaggtagtagaacaacaagccgcctacgcggtggttcccgaaggtgcggtcgtagttgactttggcgtcgaaatagagtttccgccagttccatgcctcggagttatactgcaccgaagcctcggtgacctgttccgaaaggatcagctcgcctttctggttgcgctcgcgtgccaggtagagggccggcatggagtagcggctttcgccgtagagcgactgggaatcccacgaaccggtggcctcgatgttcagcccttcggtgagcatcgacaaatcctgttttatgccgatgttgaagagcgtgcggcttttgttctccacggtgttgcccgtgtagttgagcagcacatggggcgggatgtcgctgtccgaacccgaggcgggcagctcgccgctcgaatagcgcagcgggtacatcagcggggtcgttttggactgcgaatcccagatccagtcggtgagcgacgtgtcggtgcggctgtacttcttacccatgctcggacgcttgttcaccgacatgaagcccatggcacccaggtagatctgcgtcgtcttggtcaggttgatgtcgatgttggtgcggaaattataggtgtcgtagccgacgcccttgttgtatttgctgtcgtccatgctcttgtaggccgacgattcctgcgacatgcccaggctggcgaaatagcgggcgatgttgccgccgccctgtgcactgacatactgcgtgtgctggaacgaggtggggttgaggatcacgtcctgccagtcgatgtcggggtagaggtcgggatccagcccgtagcggatgatgtccatctgcgtgtcgttgtagatcgggctcatgcccgaggctacggctgcttcgttcgccatttcggcatactgcgtggcacccacgtagcggggcaggcggcgcagctcggagatggtgtagttcgagcggaaggtgattttgagctgctcctgttttccgcgcttggtggtcacgagcaccacgccgttcgcaccgcggctgccgtagacggccgttgcggcggcgtccttgagcaccgagaagctctcgacgtcggccgggtcgatctggctcaggttgccttccagtccgtcgatcagcaccagggcgccgctgttggcgccgaacgtgccgatgccgcgcacccagaattcggagatgttccgccccggctcaccgctcgactggatggaaatcacgcccgggacgcggccgccgagcgtgttgacgatattcgtcgcgggcagttcgaggtctttggtgtcgaccaccgccacggcgcccgtcacgctgactttgcgctgcgtacccataccgatgacgacgacctcttccatctggttgccttcccggagggtgatcttgacgtcggccgccgaagtgatgatctgttcggcggtttcgtaccccatgaacgatacggccagcgtattgtacagtttggcggtgagtttgaaccggccttccgaattggtgatggagccgatgcccggctcgtccttgatatagaccgtggcgccgacgatggggacgttgtcggaatccacgaccagtccgttcacctcgaccggctgctgctgttgctgtttgctctgggcacctgcctgtaccgcgagcgcgagcaggaaggcgcatatcaatagaattcgcttcatgtctgtttaggattgttaggtgaataaacctacttattcgatggctatgcggcggatggcatagttctcgctgtcgccgatgtagaggttgccttccgcggtgatggccaggccgaccggtttgttgaatttggccgcgtcggcagggccgttcacatagccggacgatttgggcgtccccgcaaacgtggagacgtagccattcgagagcgtgatcttacggatacagtgattctccctgtccgttacgtagatggcctcgccttcggggtctacgcacatctggcaggggtagttgaactgcgcctcggcgagcggcccgtccagatagcccgccgtgtttttccgcccggcccacaattcgatggtgccagcggcgatgtcgtgcttgtagatgcagtgctggccctggttggcgaaatagacgatgttggggtcgcgcggatcgaagacgacgcccatgatgtcgccctgggagtctatgaagcggccgggaggcgtgagatcctcgccctttccggtggcgggatcccagcgggccacgacgccctcgttggtgtagaagtagaatttattgtcggccgggcacatcgtgaaggtctggatggcattccacacgggagcgaaattgccgtcggtatagaacaggtcgtgatcccacttgatgtctcccatgttcgtgttggcgtagtcggcgacggggtcgaaataaccgtatcccttgttcccgatgttggtgtggtaccaatatacattgcctgtggccaggtcggtgctcaggaggatacccgttacgaggatgccgaaatcattgaggactttgatatttccggcctcctcgttcatcatgtagacgcggtgcttgcctccgtcgtctatgctgaagcggacgtagaggttgtcgtgcttgtcgacggcgattcccgattcgggcttcgacgagaaatacgacccgatcagcgaggtggttccttcgggcatggtagtgcccttcatgcccccggcgatcgtggaaacattggtctggatgatgtagtcgaacagttcgtcgaactgtaccttgttctgctcgttctcacccacggagaccgagatgacgcactcttcgcccgggagtttgggggcaaggacgagcatgcggtctcccgtcgaggagattacggctgcgcgcttttcgttgaagtagacattgagggctttggcgtcggtgccgaagttcttgcccttgatgattacctgggtcgctatcggcccggttttaggatagaacgattcgagttcgatgggtttgtcgggttggtatcccgaattccccccccctcgtcgccgtcagagcacgctgacagcccgattcctgccgtcaggcaggcgagccataagtgtaaccggcatttgcagtagaagtttttcatgaatgttggttttagtagggtatatattaataggttgacgcgtggtttgcggcggttttaaccaccccggtgtgccgcggccgtgcaggggcgccccgaacccgatgcgggacggtcggggacaaaacacaccgcggcgacgggacgggtcgtcccgccgcccgggaaagggcgtatgagccgcattgacggtttccccgcaggttggtgggtcaggttcatttacgtttcgcaagtcccgtcggagcattcgtccgtcaggagtttttgtacttatacaaaagtacctaattgcgggtgtaattcaagtccgccggagttgaaatgagatgtatgttaactcgctctgaaaattaacatgctgtttttcattgcgttgcatgctcggctgtttgccgttttggtaaacgggaattagagttgccggtggatatgcggatttaatatccggcgttttgacggcttgccccgcctgtgggattgggaggatcggacactgatagctgttgtccgggcactggggcgaccgcaactttccctcaatcccgcgccggacgtcgtcgtgggcgtgatggcagagggaaaaccgacctgggccgatgaggatgcactcgacgcaaacggcaggggcggatataatatgcgggaaagccgtccgttttttagaagcggacggttttcgtatcttgttccgggattgtgcgcagcccttattaaaaggtattgcagcggctcatgtggaaatcgcacttgattttgtcgggcgacttgtcggggattatcttcgcaaccaatatgcccgtctgccggaagccggttaaaacggtggttgagccgatgaggatgcactcgttgatcggcgacgaagcctgaaggcatgcaaatagaaagggccggacattttgtccggcccttttcgcatggtcgcgtggggttacttggtgacgcagatgtcgtcgatgaaccaccgcgagaattcgccgctggcagcgtcgctcgtgaatttgatgcgggtcgaagccgtcgcgccctcgatcttcagcgtatagttgttgaaggccgtggtcgaaaggttttcgacggtggttctggtcgctccgctgatcgttccgccgcccgttacctcgacgacgatcgtcgtcaggtcgcctttcttgtcggcgggttccccggccttgcctttgggacggtcggagaaggtcttgtaggccatggctttgaacgagaggttcaggttgccggcggtgccgagagccggtgtcagcaggtagcccggcgagttcttgtaggcgttgcgcgccacggcctgcgtttcgacatagccgatttgggcatagcccggacgctggcggacgttctcgcccgaaattccgttcttcacggacggcgcccatgacgtgatgtcgctgccgcagtagttggccattgccgccagtttgtcacccagcaggtagtcgagtccttcggtcaggttgtcgaacggttcgaaatagagggctccggcgggtttggcggtgtggaacgacggtatcgcctcgatcgcgaagcacgagtgcaggcgcgagtcggagttgtagcccgccgtgccgccgttgacgctggtttttcccgtggggtagagtttcaggtagagtgtctgccccttggtcaggttgatcgtcggggtgaggggcacggtgtaatagaagaagaaaccgctgctggagatgggctgcgtgacggagatcgctgtcgagttgtcgtcgggcgtgatgaaggtttcgttgtcgttggagtaggccagaacccagtcgcgcggggcgccgcccgtacccgagagtccgaacgacacgcggaatttggcgggcatgtcctgcgccagcgggagcgtcagcaggaagtagcagttctggccggcgaccatcgacttggccgggatgttgtcgtgcgcgccctcgtcggcccagtgggtcatgcggaaatcgctcgacgtgcggccgatggcccgtgccgtgaggacggcgcagatgttgttatccttatcttcggccttgaagtctgtgccctgcttgtcgaacgtaccgtccttgatggtgatgtacttgcagtccttgttggcctgcgacgaggcgtagaacgagaatacgtagggcagcttgataccgatcgacgcgccgaagcggatgcccgtcagcctgaggtcgttctcggtgcaggggcggatgccgaccgtgcggtcgtgcgggacggcaatgcctttcagcgtgccgctgcctgtgggcgcggcgttgatgccgaacgaagccatctggtcggcgatcagcgcgaaacggtcgttgtcgggggtctgcatcgtcagcccgtccattaccttcatgccgtcgagcgagtgcccctcttcgacgtacacctgcgaataaacgcccacgtacatcgattcgtatacgcccgacatcaactgctcgtacgtgatggtcgtggcgtcgaggatcacctgcgacgtttcggtgcgtctggcccggtcgtcggaaacgggtttcagctccatgacgccgttctgggcgctgcggctgacgacggcccctttcaggtctacttcgagttcttcgccgatgttgtagtaatggatgtcgtcgagccggagcgtgatgcccgtgccgggttcgggactcccctgcagggcgatgcagtgctcgaagtaattgttgtcctctacgctcgatacgacggtgccgcgcatcttcacctcgtcgggcaccgtgtagtcgccctcggcggcgagcgccttgaggtcggggatggtgatgtagccttctgcggccgccgcgccctgcgtgacggtcagtacgtccttgacgtcggggtgcgagagcgaccgggcggtgatcgtcaccgaacgcgacgtttgtgtgtcgtttttggtcagggcggcttcgatcgtggcgttgccgacggccgaggtctcggagagttcgacccaggacgtttcggcgccctcgacggtgatttcccagtcgcagttcgaatcgacgctgaacgacagggtcgtggcgaacgacggggctaccagcgtcggggtgctcatcctgagcgtcggcatcggaagatccacatcgtcctgacaggcccacgccgcgagtatggcggcggctgtggcgagaagcctgaatggtcttataaggttgtttttcatggtcaggtcattttttatttagcaataagtggcagcgtgtgccggatatctgccgaagaggtgcccagcagtatctcgaaatcgccggggtttacacgccatgcgtgcgtctggtcgcaccagtaagccagatccctgtaagcgatctcgaactccacgacctgcgacgctccgggcgtcagctccgttttgcggaagcccttgagctccttcacgggacgtatcaccgctgggttcttctccgaaacgtagagctggacgacttcggcgccgggcagcgtgcccgtgttggtgagccttaccgagattttgactttctcgccgtcggcgatggctttggccgaaaggcggggcttcgacagctcgaaggtggtgtaggagagcccatgcccgaaggggaagagcggctcgatgcccttggtgtcgtaccagcggtagcctaccagcactccctcggtgtagggaatgtcgtaaagctggatgagccgttcgttgcggcattcgttgtagaactgtccgtcgggcggaatgcttcctttggccggagagtcggcgaactccttttcgatggttatcggcagtttgcccgacgggttcagctcgccggcgagcactttcgcgatggcgcggaatccgttctgtcccggataccagccgtagaggatggctgcggctttgtcggcccagccggtcatgcggatgcccgaaccggaattgaccagcacgacggtgcggggattggccccgacggcctgctgcaccagcttctccgcggaataggggagcgcgaacggacgttcgatgctctcggcgtcgagcgtccccacgcttacgagtacgacgtccgcggcggcgaactgctctttcgagggtttttcggcgaaggtcacccgggcgccgaactgctcttcgagcgcttggcgcagggtgacattgttgtaacccttgactgccgccgaacctgccccgcgcgggatttcgtcgagaaattggcctgccgcgagtatcttcgttccgggtttgagcggcaggagcccgtcgttccggagcagtacgatgccctcggagctcgttctgtaagcggcggcttcgtgttcgggaagtttcgccagcagttcgggtttgtacttttcgtcgcccttgcggtcgtacagcccgaaccggatgcaggtggcgatcagcggacggatcatcgcgtcgatgtcggcttcggtgattttgccctgcgacagcagctcctgtgccgtgatatcctctttccagctgccaggcatctcgacgttctgacccgaaagaatcagcttctgcatgtcgtagaccgaattccagtcggtcatgaccagtccttcgaatccgagttcgccgcgcagcaggtcggtaatgacctctttgctctgacccgcccactcgccgttgatgcggttgtacgaggtcattacgcaggcgacgcctgcggcgatgccggcttcgaagccgggcaggtagatctcacgcatcgtgcgttcgtcgagaatcgagttcgaacggcggcggtagaattccgtgttgttggccaggaagtgtttcaggcaggcggccgtgccggtactctgcatcccctgcacgtagttctcggtgatgcgcgacgtgagaaacggatcctcgccgaaatactcgaaattgcggccgcactgcgaattgcggtagatgttcagtccggggccgagcagtacctcgacgccgcccgcacggcactcctcgccgatggatcgggcgtaatcgtaggccagcgccggattgaacgtggcggccagcatgatcgggcatgggaaggcggtggacttttcgagctgccgaaccatcgtggggtcgggcaggttgtggcgcatgttcacgccctgcgaagcgtccgaaaggtagatgtaggggatgccgaggcgttcgatgccgttgaagaagaagcggctgtaaccccgcgtcatcgagattttttcgtcgagcgtcatcttcgatagcaggctgtcggcctgccgggcggcttcgaccacgctcatgcgcggctgggcgaaaccggaaacggcaaaaaagagcagtaaggtcgataatgcgatctttttcataacaggttattttttgatgtccaccaatacgggcaggtgatccgacactttattgacattgatctcgtcgtacgacgggacggccgttcccagcacttcgcaggcggccttgttgcctttgtaaagcacgatgtagtcgatacgcttgggggtggcggtgttcatgaaggtattggacgaggtgctgatgatctcccatttctccttcagcttgaccatcatctccgacgacatgttgctttcgttgaagtcgcccgcaaggaagatgggcttggtgtacgatgcgtagttggcggcgatgtaggcgttgatgatctccaccgactgcgcccggttggtcgtttcgaggtggcagaggtgggtggcgataaagatgtaatcgtcgaactcggcgaggaagaacttgcgcgcctcggtgccgggcaggtcgcccgatacggtgcgcagcggttcccgcttgctgaggatgccgatgccgtagtcgccgccgcggtagtcgatcgtcttgcagtagtagggtttcatgcccgtgcggtcggccagctcctggagctggtcgtgcgggtgccatgtggtgaatttgtccagctcctgcagggcgatcacgtcggggtctatcagcgaaatgaccttggctgtgttgttgtagttggcgcgatccacgttggtctgggtctcccagccttcgcagcggtgggtgttgtaggtcgccagccggatcgaattgggcaggcgtccgtaaccgtccttgtaggggttctcggccgctccggccgagtgcccgaaatcgaaatcggagttgtcgccgtcgagctcgttgcacgcggcgaaggtcgttgtcgtgcagaatgccagcagcaggtatgctaagtttttgaatttcatggtcagcgtttttttgttagaatttgagtccgtcgtcccagccggggttctggctgatggcgccctgcgtcagtacacggtcgtcagtcgggatgggatagaggtaatcccgctcttcgttccaggtgcgcacgaggttgggatcgtcgtgtatccggatgtagccgtggtcgccctcgctcagtttgacgtccacgccgagttcatagaccacggggattttggtgtcgggtttggtgcccgaccagatacagacgtcgtccgtgccgtcgctgttgaggtcgtacgagccgacgcccgggaagtagagcccttcgaagggcttttcgaaacgcttgccctctttccagcgcatgatgtcccagtagcggaagttctccatgagcagttcgacggtgcgttcgcggcggatttcgaggatgacgcccttgttcgctcccgtgacgttggcataccccgtctcggccgatgccaggtaggggtcgggattggcgttggcccactccagcgagaggttggccacgccggcgcgttcgcgcagcggcttgatcgtcttgtcgaggtcttcctgcgtcagcgtgcccagctcggctttggcttcggcgtagttgaggtagacttcggccgtacggaaaagcggcatgtcgctggtcgaagcctggtaagcgtcgtatttggccggtagcaggaacttcaccagctggtagccggtcatggtcgcggccaggttgggcgccgactccttgtcgtcgtcgatgcgtttgtagcccggcgtgcggacggtctgtgcgaagcggccgtcgcggtttttgctctcgtcggggagttgcatcgtttcccagccgggctgcgaggtgaagggcgtgccgtccttcatcaggtacatgttggcgacgttcttcaacaggccggggcgtcccatcgtcgtgccggtcaggtagccattgacatcgtgtttgagcccgatggctgtgttgaaggcccgtgcgaggatgatctcggagctgatggcgtttatcgaggagaagaggttcaggtagggcgtgctgcccgacttgtagatggtgtagccgcttttctcgatgaaggttccggcggccgatacgcactcggccaggtaatagtcggcgtcgtcgagcccgtggtacttgcggaaggtgccttcgaacaggcagacgcggcttttcagcgccagtgccgtccattcgctcacacggtaggtttccttggtcggggagaggtgctcgatggcgaagtcgaggtcttcgatgaccttcgacatcaccaggtcgcgcgagtcgcggcccttgtagagctcctcttcgttcgaagccagcggacgatccacccagggtacgtcgccgtagtatttgaccttttcgaaatagaaataggctcggaagaaacgggcgaggccctcgtattgcaggcgcacgtcgcgatccttgcagttggatgagtattcgaggaagaagttgatgtcgcgcagcttctcccacttccaggtcgaggcggtcgcgggaacggtgcggttaccgagcacttcgctggtcagcacgttcttggcgatgacgtcggccgactcgccgtagacggtcgtcgggaaaatggtgtagaaatcgttggtgtagagctggcactcctgctcgttgcggaagaatttatcgggcgtgagcttatccttggggtagcggtcgagttggtcttcgcatccgtacagacccagcgcggcgattccgaccagcgtatattttatcagttttttcataacggcagttatttagaaggtgaggtttaaaccgatcgagtaggtcttgcaccacggatagacgttggccttcttgtccgagtcggcggcggcctgttcggggtcgaggaatttgcttttgagcgccgtccaggtggcgaggttctcgccgctgaaatagatgcgcagctccttgatgccgatcttcgaggtcaggtgcgtgggaatggtgtagccgacagtcaggttcttcaggcggcagtaggccaggttctggatataacggtcgttggtgtagtagaccacgcccgacgtggagttgagcgagctgtaggcacgggcgcgcgggaagtaggcgttggggttctcttcgctccagaccttgctcatgaagtcgcgcgggatgaatgtcgcgtagggacggctgtaggggccccagaagcgaaggttgtcggcgccggggtaccagtcctggcggccaatgccctgcacgaataccgatacgtcgaatccgtaccacgagaaattgaccgtggcgccatactggtagcggggctgcgagttgccgatgatgcggcggtcgcccgtgtcgtcgagcgtgcccttgccgccgttgatgatgttgttgccgtccaggtcgaggtagatcacgtcgccggcgcgcacgcctttgccgtattcgcccgtcgaggagtagtatcctggagcgaccgtcctgtagtcgatgcgcgaagcgtattcggcggcttcctcatcggtgcggaacagtccgccgaccttatagccccagatctcgccgagccgcttgccgacgtagggatcgccgatcagtcccgtggggttgtcgcacttggtgtatttggccgtgtagtcggacagcgaagccgagatgccgtagctgaactgtttgcccgccagcttgaacgagtcgcgccagccgagcaccagttcgtagcccttcgtgcgcaggtcgttggcattgacctggggttctttggccccgtagatcgagggcagcgatttgccttggctcaggatgcctttcgtgtcgcggatatagaagtcggccgagagcgaaagccggttgcggagcatattgaggtcgataccgatgttttttgaaacgactttctcccaggtctggttgcccgatacggggtcgctgaccgtggcgtgctgtcccagtgccgagccgttgaacgagtagtcgttcatcgtgcccttggtcgaaatggtctggatgaagtcatagtatccgatctgctggttgccgagcgaaccgtacgaaaaacggagcttcaggttgtcgatggtgctgcgcagcggttcgaagaaagactcctcgctgatgcggtaggccgccgagaacgaagggaagaagccgaaacgcttgccgcgcgggaaacgcgaagtgccgtcgtagcgcccgttcatctcgaacaggtatttgcccttgtaatcgtaggccgcgcggtagaaccaccccatgatagcgtattcgttgcggccgcccgtgaggtcgatggtcgtgcccgtggcgaggttgaagtccgagaggtcttccgaaagcagcccgttgcggcccgttttcaggtcgcggaagtacttggcttcgtagttgtagccggcgatgagcgtcaggttgtgcttatcgctgaaggtcttgttgtaggtgccgtagacgtcggccacgtagtagttctgatcgtagaccgtttccttgtatgcgttggggaagttgccttcgggttcggtttcgaccacgccgggatatttcgaatattcgacgttcacgctgcggtaatcgtaatgcagatagccctgcgtatagctgaagtctgccttgacgttgaagttcttgtggagcttgaattcagcttcgaacgtggtggtgaactcctggatcttcttgttgccgccgctcttgcctttctgcatcatggcgttgtagccgtccatgacgtagtgggtcgaggagttggtgcccgaggtgtgcgacacggccgtgccgtcggggttcaccgggacgaacgatgccagcgcatggagcgtcggtttgcggaagttgttgtattcgtcctcatagccgtagtatttgtaattggactggaagaacttggtgttgctcgagatggtcagccacggccggagctcggcggacagcttcgcgcggaagttgtacgacttgtacatgtcgggcagcagtttgttgatacccttctgctggtagtaacggccgctgaccatgtacgaaagcgccttgctgccacccttgatgttgatgttgtgatcccaggtcgggcgggtgtcgtcgtagaggtagttgtaccagtcgaagttggccaggtagacgtactgctgctggccgttgcggcggtcggtgatgacccagggccgcgccggattctcctttttgtcgttgcggcgctcccataacgcctggtaatcggactccgtgtacgaggtgtagggcgtgttctgcgccgagagcatgaacaggtcggcgatcttggccgagtagtagccgcgggtttcgtaatcagtcgaggttgtcgggctggacaccgagaagtaaccgttgtaggaaacctcggccttctcgttgaacttgccgctcttggtggtgatgaggatgacgccgaatgcgccgcgggcgccgtagatggctgccgaagcggcgtccttgagaaccgtgatcgactcgatgtcgttcgagttgatgcgttcgggataggtttccacgccgtcgatcaggatcagcgggctgccgccgttgggcgacgtgttgccgcggatgttgtacgaagctcccgcgccgggttgtcccgacgagagggtgacgttgaggttgggaatggcaccctgcagggccctgcccacgctcgaaacgggacgatcctggagttctttctgcgagatgctggccacggcgcccgtcaggttggccttcttctgcacgccgtaacccacaaccaccacttcgtcgatgctctgctcggaagaggtcagcaccacgtcgaagaaggtgcgattgccgatcttggcctgataggacgtgtaaccgatgaacgaaacgctgagcgtggcgtcggtcgagaggatttcggccgggaatgcgaatttgccgtcgaaactggtggtgatgcccttggtttgcccgccgtcgctgagtagtactgtggctccgacgacgggagcgcccttgtcatccttcactgcgcctttcagggaaacgggtttccccccccccggctactgcgggcgccttcatcagtatgatacgcctgttttcgatcttgcaggtgcagtcgggtagcatctcccggacgatttcggtcacgggacgtttcacggccgatacggacacggttttttccatgtcgaaatcgccgttgttgtagaagaacgtgtattcggtcatgcgctctatctcgcgcaggacttgttggacggtcgcattggtcctggcgatgctgacggtgggcgaactttgcgcccggctacctgcgggccatagcagcagccatgccagacagacgacaccgaggattctggttttgctaaaattacgcatagattttaagtttaggttaggtttgcggagttttgtgcccagggcacaaggccgggaagttccgaccggacgaaagttcgggtagtcgatgttacataggctgaggtttggtattacttgtgatttctactttctctgggaataatcgtcacatggcggttctcgcgcgcatagttgatgtccacgaccaacgacatggctttgagtatctcgtcgatgctctcgttgcgaattactgcgaacgacatcctgacctggcgcgcccactcttccggacagtcgatctcgacggcgtaccagcactggagattggcgatgatgtcgctgagcggggcgttgtcgaacgacagctcaccgttcatccactgcgaatagttcagcgccgtgacctgcgacagcgagatgcgaccgtcttttttcgaataggccagccgttcgcccggcttgaggatcaccggccgcggcagccggcccccgaaggcgcggacgcttccgctgcagaggattacttccgtggtgctgaactcggcgtagttgatgaaatcgaattccgtgccgagaacctcgatattcatgtcgtcggctttgaggatgaacgggcgtttttcgtcgcggcggactttgaagaatgcttcgccggtgagctcgaccacgcgcttgcggcccgaaagatcaccgtaatagcgcagcacgctgccggcgttgagccagatgcgggtgccgtcgggtaatacgtactcgcctttgtcgtgggccgaggtgacgatgttggtctgtaccctgctgcgcaggtagccctgtgcggcgaagtaattgacgcccacggccagcagtacgaccgccgctgccgccgcgacctttcgccagaggctccggcggcggaagctctcttcgcgccggatggcttcgtgcaggcgggccagcttccggtcgcggccgggccgctcggcggcctcgagcctttcccagtaggtttcgagcgtttgttccttctcggtgcgtgcttccgggtcgcgcagccagtcgccgaacgcctgctgcacttcctgcggcatctcattcccgaggaatgtttcgatgatctcttttatatggtttttgcgcataatgattcgcccgtttaccaataagacggttcatatcgggactacgcacgtcgcaagtggaattatttttcagaaaaagaaaagaatcagcttcacaagcttccgcagctcggccagggcgcgggaaatctggttctcgaccgtgcggcggctgatggagagctgttcggcgatctggtcgttcgaaagcccctcttcgcggctcatgcggaagatccggcgccgttgttcgggcattttttcgacaaccatgcggatcagcagcagcaggtcgcggctgtcgatggcgctgtcgggaagctcgtattcgggcagcaggctggccctgcgggcgtaattctcgcgcaccgaacggttgtcgaagcggtcgtagacggcgttgcgagccatgcggaagaggtaggggccaaatgcgtccacggcgccgatcgaagtgcggttgcgccatattttgaggaaaatatcctgcgtgatgtcctctgcttcggagtgatccttgagcatacgatacaagaattcttccgtcttcgcagcatatttcaggtaaagcgcatcgaaagcggaacggtcgtctcgagccagtgcctcgaggtatcgtctttcttcatccattatgatccgtcggggtattgtcaggtaaaagtagtgaatttttataacctgcaagaaatttccgggaaaaattaatccgcttgcggtgtcctgtgacggatacctatattgatgccggtcaacccggcttcgcggtgcccggctgcgggcgggcgatttgaggaaaaatcagatttgcaaacacgataataagaccatgaataacggtgactcgatacaaaaataggttccgaaatctctggtacatcaaaatatgtaattactttctggaatcctgctgcgagaaatgcctgcacaatgatcgttcggcccgttgatcccaatgatccggctcagtatggcattgcgtgaagatttcgaccgcatgtccgctggtggttacacgggcatagataggcgctttgcctttcttgtcgattttggtcttcctgcgtaagaacaccacgctgaaagttcgccgagccgagggccgagccggacttgttcgagctatgccgaggcgagaatgaatttcaactttgttgaaagtctttctttccatactgctgtaaatggttggtgagtaatatgtttacagcatagaaatgttgcgaggcaaaaagctgacagttaatgcaataacttacattagtgacctgttttcggttcgagcaaaacaggttgccgataaggtcgtaaaaacctgcttttcgttgcttttatcggcttcggcctaaaaatgaaaaaaccttacatatcattgatacataaggttttttactctgttttgcctcttatttcaaaggcttcaagggtggaagatggggctcgaacccacgaccttcggaaccacaatccgacgctctaaccgactgagctacatccaccgtgtgaccgtcgaacggtcgtatcgggatgcaaatgtaatacactttttttgtccgtgcaaaaaaaacggtgaaaaatcttcgggaaaatgccccgggtgacaaaatggcaggccggactgtacctttgtcacatggcgtctgccaaaaaacggttggcacatctattgatggaactatgggtgctaacgcgcaacaaactgttcaataataaactaaaaactgaaaagctatgaatgtaaaaccattatcggatcgtgtactcgtcctcccgaaccctgcggaggagaaaacggccggcgggctgatcatccccgacacggcgaaggagaaaccgctggcaggtaaagtagttgctgtgggccccggtacttcggaggtcaagatggaagtcaaggtcggtgatcaggtactttacggcaagtatgccgggcaggagattcaggtcgacggcgtggattacctgatcatgaagcagaacgatattttggcgattatctgacgacaacaggttgttctgacctcgaaatttttacattccctctgaaaatccccttgaaaagggtggcttcggggataagcttatgaacgaatataaaatataaagttatggcaaaagatatcaaatataatgttgaggcgcgcgaactgctcaaggagggtgtcgatgcgctgtcgaacgcagtgaaggtgacgctgggccccaaaggccgcaacgtgatcatcgacaagaaattcggtgcgccgcagatcaccaaggacggtgtgacggtggccaaggaggtggagctcgaagacgctttcgccaacatgggcgcccagatggtacgcgaggtcgcctcgaagaccaacgacgatgccggcgacggtacgacgactgccacggtgctcgcacagtcgatcatcggcgtaggcctgaagaacgtgacggccggtgccaacccgatggatctgaagcgcggcatcgacaaggccgtggccaaggtggtcgagtccctgcgcaagcagagccaggaggtgggttcggatttcgataagatcgagcaggtggccaccatctcggccaacaacgacgagacgatcggtaagctgatcgccgaggcgatggcgaaggtcaacaacgaaggtgtgatcaccgtcgaggaggccaagggcaccgagacccatgtggaggtcgtagagggtatgcagttcgaccgcggttatatctcggcttacttcatgaccgatcccgagaagatggaggcacagctcgagaagccctacatcctgattaccgacaagaagatttcgacgatgaaggagctgatgggcgtgctcgagccggtggcgcagagcggccgttcgctgctgatcatcgccgaggacgtggacggcgaggcgctgtcggcgctcgttgtcaacaagctgcgcggtacgctgaagatcgccgcctgcaaggctccgggcttcggtgaccgccgcaaggagatgctcgaggatatcgccatcctgacgggtgctacggtgatctcgaccgacaagggtatgaagatggaggataccgacctttcgatgctcggtacggcggacaaggtgacgctcaacaaggagaacactacgatcgtcgacggtgccggcaagaaggaggagatcgcagcccgtgttgctcagatccgctcctcgatcgacaaggctacgtcggattacgacaaggagaagcttcaggagcgtctggccaaattggccggcggtgtggccgtactctatgtgggtgccgctaccgaagtcgagatgaaggagaagaaagaccgcgtggacgacgcactggctgcgacccgtgccgctgtcgaagagggtatcgtcccgggcggcggtgtggcttacatccgcgctacggcggctctcgaagggatgaagggtgccaacgaagaccagacgaccggtatccagatcgtgaaacgtgcgatcgaggagccgctgcgccagatcgtcgagaacgccggcggcgaaggttcggtcgttgtcaacaaggtgaaggagggcaaggatgccttcggttacaacgcccgcgacgacaagtacgaagacctgctgaaggccggtatcatcgacccgacgaaggtgtcgcgcgttgcgctggagaatgccgcttcgatcgcttcgatgttcctgaccaccgaatgcgtgctggcggagaagaaatccgatgctcccgccatgcctgcgatgcccgcaggcggtatgggcggcatgatgtagtcaccgattcataataggaaatcggagcctcttacggaggctccgatttttgttttgccgcgaagcgatcgaggcggcattctccggcgctgcgggcggttggccgggaggggttccgcgcggggcggcgggtacttcgttggccgcagggctattttttgtccgcgcatttgcagcccagcatcttccatacgccggccgagagggctgccccgatgaagggcgcgacgatgaagagccatagctggcagagcgccgtgccccctgcgaagagcgcagggccgaaactgcgggcggggttcaccgaggtgcccgtgatggggatgcagacgatgtgcaccaacaccagcgtgaggcctatggccagtccggccaggtttcctgcgcccttttcgctgtccgtggagccgagcacgaccaacacgaagatgaacgtgaagaccacttcggcgacaagggcctgtgccatttcgccctggccgaaggcgtttgcccccgtggctgtggttgcgccgtagccgcccgtcgaggtgagcaggtagaggatggccgagccgatcagcgccccggcgaattgaccgagcatgtagccggctgcgtctttgccgctcatgcgcttcgagagccatacgccgagtgtgatggcagggttgatgtggcagcccgagatgccgccgatgcagtaggccattgccacgaccgacaggccgaatgcgaaagctacggccagtatctcggccggtgcgtcgcagcccaggaatacggcgcttccgcagcccatcagtacgagaaccattgtccccagcatttctgcaaaatatttcttcatagtcgttagaatttagcgggccggagccctgtttgcaaggcaaatatacgaaaaatagcaaaaaaaggccggcaggtagacatttcgggaactgtgtgtcaggtgtctgcatcttttgccctgcggataatacgggcggaaaaatgcaccctctggttcggttgtgtggggcccgggtggcagtcggccgcccgggtgcggggcgttggcagccggtacgatggcaggtgttgcagcaggggcggcctgtgcggtgtggcagcgggaattattgccccggaaaaaggatgttgggctatatcgtatctatttttggccgatttgtttggttttcggagttgtaatgtctatctttggctgcgaaaaataatcgggttccttggagtgggaagatgtgcaacgggagatgcggaacctatttgattgatctaacatgcccataatgaagaaatgtcttacgatcttgatgctggccttcctggctgcctcctgcattgagaaaagcgatgtccgtcccggcagtcccgtggacgtcgacatcgaccattaccaaacggccggcacgtacgatgtccccgtgaaagaaggttgcatcaccgtagtgaaggcatacggggtgacgttggccgaagccgaaagccccatgacgatctgggtgccgcggatgaccctgacccgttcggacgaggggctgacgacgacgttcgtcccgcgcgatgagtaccccaatttcgcaggcaacaaatcgcagttgttccaggtagtatgtttcgaggactccaggcgcggggattacgattacaacgacctggtcatccatgtgctgtaccagacccggcagaatatcttcgggttcggcgtacagcccgtggcgttggggtcgacgaaatccatcaaactgggatgtgtcgtttacaagggcggcaagcgtatcttcaaggggttgatcacccccgaaggtgccgattgccggtcgcagtatttcaagtcgatggagggaacgctcaatacctacgacaaggccaatatcaaggtcggggagtacctggggtcgacgatccgcaactgggatgtgtcgaagatcgaagggaacggcccgatgcgcgttgagtggtatatcgaggtggataacggcgtggaactttatgccttgtcgactgcctacctgaacgattcgttcgacaaggacaaattgccctacggactggtgatcaccaccacggggacggaatatgtcgacgagaaaggcggctacctctgcgggttcgactggttcaactatccgcgcgaatcggtgcatatcaaggaggtatatcccgagatgtggaactggctgactacggacagcagctataattttgccgatatttacgatggcaggaatgtccctgcgaatgcttgccctgctgccgacctggggctgttcgaagcccggacgatcgacgtcaccaacaggaaataccgggctgactgagcccgtgccgatagcggccgaggcgggctgcggtgccgtcgccgattgaaaaaagcaaccctgcggggttgcttttttttatgtgcgggcttgttgtcatgcgctgcgtgccccggggatgccggattgcccgatgcacggtgttgaatgcccgataccggcggcgtgtgctgcgccattgccggccctgttcccggctcccggttccgatccttcccttgcaggacggggctccactttttgtcagggcatccactccaggatccccgtcacggggttggcggcgcgccaggcttcgaattccgcataggtacccacgccatcgcgcagtacggcctggtagtattcgatacccatgatcttcttcgcctcgggggtttcgtatttgagccggaggatcgtttcgcgcgtccggtcggtcagcacggcggcgatgcggtcggccacccgttcgaaatagccgtcgtaggccgaacctttcggcatgtggatcatgtcgatctgccataaccggtcgtcggcatcggcataccaggcatgccattcgaggcattggtcgggggcgtcgagcaggttgttgaaggtgatgctgcggatgcggctgttttcggccaggcgtgccatggcggcgaagctgtccgcaaggcgcagcggtgaggagtagatgtggaagtcgatgtcgcggtgcgtcatcagcagtcccgtacggagcgacccgaccaggttgggttcggcgccgacctgttgccagatcgcttcgaggtcggtatcgcggataacttcgcgggcgcgctgctggttggcggcggcgatcttcagtaattcgtccatgatgtgtaaagttgcggttattgcggggttaaaagagcgtcgggacggattatccgtcccgatgccggggcgttgcgtgtgcggttatttgcccagcaggatgcgtgcctgggctatggcggcatcggtgatgcggctgccggagagcatcttggcgatctcggtgatgcgctcctcgtccgtcaggcgggcgatgccggtgcgcccgtcgcgtttgtagaccacgaaatgggctgcgcctttcgacgccacctgcggcaggtgggtgatgtccacgacctgcaacgtcgcggagagcgattcgatgatctcgcccatggcgtcggcgatgcgccccgagacgcccgtgtcgatctcgtcgaagatgaccgtcggcaactgcatgcgccgggccagcagggatttgagcgccagcatgacccgcgagagctcaccgcccgaggcgatacgttcgacgctctgtggcgtcgcgttgcggttggccgagaagaggaacgccacgccgtcgcgtcccgtgcgcccgaggtcggggagcggggtgagcgtcaccttgaatacggtttcgggcatgcccagctgggcgagtgtctccaggatctgtttttcgaaggccggggcggcttttgcacgtgccttgtgcagcctgtcggccaacgcgccggccttctgcgcggccgcgtccagttctttttcagccgctgcgatctcttcgtcgccgtgtacgatggcggcgagttgtgcggcatagcggtcgcgggctgcgatcaactccgtttcggaggcgacacggtgtttttgttgcagggcatagagggcgtcgaggcgtgcggcgagtttggccagccgttcggggtcggcatcgaggcgttcgctgtcggcggcggcggcgttgtcgatgtccttcagctcctcgagtacggagtgcagacgtgcggcgtattccccggccgcgggaaaatgttcgcggatgcgcgtcaggtcgttctcggaatttttcaggagcgtgagcattccggtttcgtcggcatcgagggcgttgcggagcgtagtgagcacctcgccgatgcggtcggcgttctccagtacggccagttcttcctcgatggcggcctgttccccttcgcggaggttggcagccgtgagctcttcgctctggaagcggagccactcctcgtcgcggcgtccgccggcggcggcttcgcgcagggcggcgagccggcgccgcagttccgtaagccgcgtatactgcgcggcatattgtgcgagcagttccccgttcccggccacggtgtcgagcgccgaggtgcggaactcttccgaggagaggatcaggttctgatgctgcgagtggatgtcgatcaggcgggtgccgaattcgcgcagctgcgccagttgcaccgggaggtcgttgatgaaggcgcggctcttgccggccggggttatcatgcgcgttacggtagtctccggcgcatagtcgaggtcgttcccggcgaagaaagcctccatgtcgcgccccgagaggtcgaaggtgccttcgaccacgcagttgcgtgcggcgtccttcatggccgagccgtcgttcttggcgcccagcagcaggccgagggcaccgagcaggatggatttcccggctcccgtttcacccgtgatgatattcaggtggggatccagctccatttcgagcttgtcgataagcacgtagttctcaaccgacagacggcgtaacatggcggtctttattttaacagtgattcgattttgtcgacgatacgtccggctacttcgctcttcggcatcaggggcagcggctcgcggccgttgcggtcgatgaaggtcaccttgttggtgtcgccgcgaaatcccgcgccggcgtcgcgcagcgagttgaggacgatgaaatcgaagttctttcgcgcgagcttcgcctcggcgttggcctgttcgtcgtgcgtttcgagggcgaagccgaccagcaggcggccgcctttggaggctcccagctctgcggcgatgtcgcgcgtacggcgcagggtgatgtgcatttcgccctcgcccttcttgagtttggtctgcgaaaccgtgtcgggcgtatagtctgctacggcggcgcacatgacagcgccgtcggcgccctcgaaggctcgggtcgtggcatcgtacatctgggcggccgagagcacgtccacgcgttccacgcccgggggcgtcggcagcgacgtacgccccgtgacgagggttacctgcgcaccgcgtgcggccagcgctccggcgatggcgtagcccatctttcccgacgagtggttcgagatgaaccgcacggggtcgatggcttcgatcgtggcgcctgccgttacgacaaagcgtttaccggacaggcgcttttttttttcgggggttcccgcggagaggagtttgcccacataggcggcgatttccgcgggttcggccatgcgtcccttgcccgtgagcccgctggccagctccccttcggcgggttcgacgatccgcacgccgtgcccggccagccggcgcaggttctcctgggtcgtggggtgggcgtacatgtccaaatccatggcgggggcgacgaccaccgggcagcgggccgagaggtaggtcgtcagcagcaggttgtcggcgatgccgcatgccattttggccagtgtgttggccgtggcgggggcgatcaggtagcagtcggcccattcgccgagcgagacatgggaattccaggccccgttctcggggtcgaagaactccacgaggatcgggttcctggaaagcgtggccatcgtcagcggggtgatgaactgcttggccagcggggtcatcacgacacgcacctcggcgcccgccgtcctcaataaacgacagagcacagccgccttgtaggccgctatgcttcccgtgatgcccagcagtatgtgccgtccggccactccttcggccgggcaggcagcgcctgcgccggggccttgtatgccacctccctgcaaatccatggcggtatccttaggactccttgacctctttgttctccttgtagaagagttcgccgtcgaggaactcctcggtagcgatgatcgcgggcttgggcaggcgttcgtagtagcgcgagatttcgatctgctcgcggttctcgaaggtctcctccatggtgtccgtcggcgaagagaagtcggcgagcttgcggctgagctcggtcttcagttcggtcgagatctggttggcacggcgggcgatgatgttcaccgtttcgtagatgttgcccgtttccttgtccagatccaccagcttgcgcgtgatggtgttgttggggatgttcttcttgatttccattgttatatgttgttgtctttgtcttcgtccttcttgttgcggtcgaggtagtcccgtgcgtgcttggccatgcggtcgacctccttggtgtatttcgattcggggaactcctccttgaacgagaggtaggagtcgagcatcgagagatagcggtcggtctgcttgtttgcgaccgagttgttggcgaagcggtagctggcgtccacgatcatgtacatgatctcctcgcggtggttgctgtccgggaattgtttgagcgcattcttcagcgatacgatggccgatttgtagcggcctatcttatagtaggtgtaggcgttcaggtaggacttgtcgtgcagccgctgcgtcagttcgccgttgatctgcttgaaatcctcgacgcggtcgctgtgggggtagcgcgacatgaactcgttgatggcgatcagtgcctgtccggtcatcgtctggtcgcgcgaggggccgggcgagaggtagtagaagcagagtgcgtacatgccttcggcgtcttcgatgaaggcgctgcggccgaacttgcggcggaaatcgtcgaacagggccgaggcggtgtcatagtcgcggttcttgaacttgcagcgggcgttgaagaacgagacgctgtcttcgcgcggcgtgccgatgtagtagtgctggacgccctcgaagagcgtcgaggcacgcgaccacttctctttctggtagtactccagcgccttgctgtaaatcagttcgggttgtccgcttttgagcagggagttgatgcctgcgcatccgctaaatgcggtgaccagaatcaccccgcacacggcgtataaaaaagtctgcttcattgataaatcttttacggcgctttatcgcgcaaagttacgcataaattaacgatttccaaaaaaatttattgtgcgtaataataaggcgccgagccgtatttcccgttcccgtccgggcgggaggcccgcgggtctcccgggatgccgcacggcggcatccgaatccgtggccggaggtgcttccggcgccggtggcggacggagggaagcctctccccggcggcgcggacaggcaggcggtaagaggggaaaattacggaaatcaggggaacggcgcgccgggcccggtgcggaaatgtcgatcggcggcttgcgctacatcaggggcgagaccagccgcagcgcgtcgcccaatgtgcgccgccatgccgcaggccgccatgtttcccgcgcgatccggcggcacgaggcaaggtcgtcgtcgtaggtggccgagagcgcccgcacgacgctccggtcgcggatgaaagccgtgacttcgaggttgtccagcaggctgcggtaatccatgttcgccgtgccgaccgaggcggtgtcctcgtcgacgatcagcagcttggcgtgcaggaagccgttgtcgtagcggtagagttcgaccccggcgtcgagcaggtcgccgatgtaggagtcggaaatcaggtcggtgaacggcgagtcgctgcacgaggggatcatcacctgtacccgcaccccgccgcgtgccgccagccggagcgcgtcgagcaacagggccgggggcaggaaatagggcgaggagatgcgtatggtgcggtgcgcccggacgatggccgagacaaaggcgtcggcgatggtcagccgcgagggcccctcctcggcccaggccagctggatcggcagtcgctgcctgatgccgtgcggggcgatgtagcggcggctgtcgaggtattcgccgcgtacacgcgcccagtcggcgatgaagagccgttgcaggtcggccacggcgtcgccctccacgcgcaggtgttcgtcgcgccatttgcccatgtaatccccgtcgaggtagtatttggcgatgtttatgccgcccaggtaggcgaccttgccgtcggtgacgactatcttgcggtggttgcggtgcgtgacgcgcgtggtgaaccacgggaagcggatcggttcgaaagctgccgtctctacccccgcgtcgtgcatgcggcgcagtgtcttgcggctcaggcgccacgagccgacggcatcgtagatcacccgcacctcgagccccgcgcgggctttgcggatcagtatttcagcgatggtgcgcccgatgcggtcgtcgcggatgatgtagtactccatgtggatcgagcgcgtggcccgttgcagcgaggcgatcagtgccgtgaaggcgttgttgccgttgtggagcagcccgacgcggttgtaccgggtggggcgtgtgccgcatccgtgggcgatgatctgttcgaggcggtcgccgcggcaggcggggcaatccgccgcggggccgttgcggcggtagccggccagtatgtagagcagcgtgccggcgacgggcagcagcaggatcagcgccagccaggctgccgccgaggcggggacgcgttgctggcgcgtgacgacggggacggccatgagcgcccaggctaagtggagcaggagtacgatatacatatcccgcgcgaggcgcatactccgtgccatgcgccgcgaaaaaagatttggaaattagaaaataactttctatctttgctgtatacaatggaaacagggttctggccttcaccggtcaggattcttatttttttacgttgtttgttttacagggttcccccgccgcaaaggggaatacaggaggattttggatgtgggacgggcatcaccggatgcctaatgtgagttcgacgggccccatgttcggaatctttcgcagcgttatgaaattcaagtacgtcggactcgtttaatattatggcaaaagagattatttatctgacagcggagggttacaaaaaactcaaggatgagctcgaccacatgcgttccgtcgagcgtccggcgatatcggcggctattgccgaagcgcgcgacaagggtgacctttcggagaacgcagagtacgacgccgcccgcgaggcgcagggtctgctggagatgcgtattgccaagctggaggattcgcttgccaatgcccgggtgatcgacgagtcgaagatcgacaagagcaaggtgcagatactgagcaaggtgtcgctgttgaaccacaacaccaagaaggaggtggcttacacgatcgtcgccgagcacgaggccaacctgcgcgaaggcaagctggcgatcggtacgcccatcgccaaggcattgctggggcacaagaaaggcgaccgcgtcgacgtggaggtgcccgccgggacgatccatttcgagatcctcgacatcagcatctgaggcgcccgatccgcagggtggcggcgcccatcgtccgcctcccggcaaccgggtgcgaggacacgacatatatccccattttcgggtatttttgcagggccgttttgaacggcccttttttattgctatctttggctcggaaagatgatacgctacgcacccaaaagactctatgcggctttgctgctgctgatcctgctcgcggcctacgcggggcagaaggtgcacatctacaacgaagaccatgcgcatttctccgcgcactgcggcgacctggtgcccgacaacggcgcgcatacgatcatcgtcgacaggtgtatcatcgacgatttctatttcttcccctatctcgacatcgcgccgaccgtgcattcgttctatgcccggatgctggccgtgctgctgcccgaggcaacccgctgcaaactctacgagcaggcgtcgggcatttcgctgcgtgcgcctcccgtggcgtagccccaatccctgggttttcttctccgatcggtttaccgggtgcatgcagcccgggtcatactatttacttattatctgacaagcaatgaaaaaatatattttgctggcactcttcatgtgccggtgcgtactggtactgggtgtcgaggcgccgaagaaaagtaccgacgccaatatcttcggccatgtggtcgaccgcgacacgcatgaacatattccctatgcgaccatcgccgtgacgggcacggcattcggtaccacgaccgacgcttcggggcattatttcctgaaaaacctgcccgagggcgcgttgacgctcgaagtccgcgcgttaggttatgcctcgcagacgcagcaggtgacgcttcgacgcggacagacggccgaactgaatttcgaggtggtgcagagcggcatctcgatggacgaggtggtcgtgtcggccagccgttccgcccggctgcgccgggaggcgcctgctctggtgagcgtgctggacgccgggttgttcgagaagaccaacgcctcgtgcctggcacaggggctgtcgttccagcccggcgtgcgtgtcgaggacgactgccagaactgcggcttcacgcaggtgcgcatcaacggtctcgacggccattattcgcagatactggtcgattcgcacccggtattctcggccctgacgggcgtatacggcctggagcagatcccggccaacatgatcgagcgtgtcgaagtgctgcgcggcggcggttcggcactgttcgggtcgtcggccatcggcggcacgatcaacgtcattacgaaggagccttcgcgcaattcggcgcagatgtcgcatacgctcacttcgatcggcggcagcaattcctatgacaacaatacgatgctcaatgcttcgctcgtcaccgagagcggccgggcggggctttgcgtcttcggccagagccgccaccgctcgggctacgaccacgacggcgacggcttcaccgaagtgcccgtcatcaacagccagtcggtgggcatgcgctcgttcttccgtacgggcgcctattcgcgcatcacggcgcagtaccaccatatcaacgaattccgccgcgggggcgacatgctcgaccggccgccccacgaggcgcaggtcgccgagcagatcgaccattcgatcgacgggggcagcctttcgttcgacatctcgtcgcccgaccgccgcaaccgtttcaacacctatgtctcgttccagaatacggcgcgcaagagctactacggcagcaagcaggatcccgatgcctacgggacgacgcacgacctgaccgtggcggcggggatgcagtatatccacgagttcaggaagctgctgttcatgccctcggagctgacgttcggaacggagtacagttacgacgacctgggtgaccgttcggtcggctacgacatccacaccgaccagacggtgcatatcgtgggggcctacctgcagaacgagtggaagaccaggaagtggtcgctgcttgtcggtggccgcctcgacaaacacaacctcgtagaccatgtgatattcagccctcgcgtcaacgtgcgtttcaacccgtcggaagcggtgaacctgcgcgtgagctacgccgggggctaccgtgccccgcaggcgttcgacgaggacatgcacatcgccatcgtgggcggagagcgggtgcgcatccagcttgcggacgacctgaaggaggagcgctcgcacagcgtgagcctctcggccgacctttaccatacgttcgggaaagtgcagaccaacctgttggtcgaggggttctatacgatcctcgacgatgtgtttgcgctgcgcgacatggacgatgcggccgacggcggcaaggtcaaggaacgttacaacggttcgggtgcgacggtgcgcggcttcaatgtcgaggggcgcgctgcctttacccgttggttcgagttgcaggcgggggtgacgctccagcagagccgttacaaggagcccgaatactggagcgaggacgcagaggtgccgcccgcgcgccggatgttccgcacgcccgatgcctacggctatttcaccgcgtcgttcaagccggtgcggaatttcacggccgacctgtcgggaacctgcaccgggtcgatgctggtgcagcacatggccgggtcgggcgtcgggcaggacgtggccgtttcgaccccgtcgttcttcgacatgaacatccgcctgtcatacgacgtgcgtatctacaaggagataaccatgcagctttacggtggcgtgcagaacctgttcaacgcctaccagaaggacttcgacaagggtgtagaccgcgactcgggctacatttacggcccgtcgctgccccgcagctggttcgtcggcgcgaagttcagtttctgattccctccttttgggactgctgaatacgacaaacgtccgaagtaagacttcggacgtttgtgttgtcgggcggttcgaattattgtaaattatctacgaatcttccgaggttggtgatgacaccagcctttatttcgagcggtttggtcgcttttcgttcgtagtaatcctctccgaaatcgtaaactttcatggtgaaatcgtcgtaggtgccgggagcgacggggatataatacacgaattctgcgccgatattctgcccttgcggttcgatggtgatcggagaggtggtatgctctcttattaattctccggttccggtcgcagggtcgtaatgatattctccggtgaagtcctttctttgggccatacctgtggcttggaaggtaatctggtattgtgcattgcgtcttgtctggatcgtcaacttcatgacgccgaatatatttttgaatgtcatggcgttcagatcggtgccgtgggcgacggcagggttacgaactgcgaactcatcggggttcttcgaagggtagttgaacgatggtttgaatacggcagatgcctctccggggttggagaatatgaatttcccgttttcgtattttaccgtgttgagtacttcggggccattggcgcaatagcatgaaactgcgagataatcgggtgtttccgcttcgtcggtgaaagtgcattcgctggtgaacgtagtgctattgccttgggacagggcggcaagttcgcctgcttttgcgtaggacccgtcatttttgaggtaccacagttggatcaggtcacctttcttccagacgacgctcagaccgtccttatccagtgccgtgcgggttttgtcttgcgacgcgattgtttcggacgttgcgttgagggtaatggtacgggtttcgggagcgggttttgcgatttcattcttttcggcgcaggagactgccagcacggcgcaggcgcaggccagaattgttttcatacttctcatgctcatcatcatttgtgggtttaccattcataatcttcttcggtgaacgagtcgtgtccgttttcgggtgtggagaccgataccgcaaagccttgttcggtgcggatttccagcagttctattgccggagtttcatacgttgctttttccatatgggatgaattgatttgaaagtgaaaattgattccgcgtaaaaaatgaaacgggaaccgtatccgcagtatgcggatacggttcccgttgaaaggatatgtcgattgtctcaactacatggcaaaattcccccccccgaacgtattacgaataggggcggcgttcatttttgcgctatgtaggctcgtattcttcataattgcgccggcaaaggtcggcaataattcatagtatgcaaaattctttaatatgtcaaatcagcccgtttggtgagcaaatgcggttcgaaattggcgggtgctgaggtgtttaggcaatgaaaaacccgccccagattgtttgggacgggtttgaaatctgttgtgtattcgcagtttaaatcgccttgatctcgtggagcacgttgttggtcttgcggacggcgtcggccgaagctgcgaatttctcggcctcttctttcgaaaggtcgatcttcacgatcttctcgatgcccttgcggccgatgatcgcgggcacgccgatgcagatgtccgactgtccgtactcaccttcgaggtagcacgagcaggggatcattttcttctggtcgttgaggatcgcctctaccatcatggccgaagcggctcccggggcataccaggccgacgtgccgatgagtttggtcagcgtcgcgccgcccaccatcgtgttggctacggcctcatcgagttttttcttcgatgcgaactgcgaaacgggtacgccgttgacggtggccttcgagacgagcggaatcatcgtcgtgtcgccgtggccgccgatgaccatgccgtcgacattgttgatgttggcgcccgtagccttggccaggtagcacttgaaacgcgacgagtcgagtgcgccgcccatgccgatgatgcggttcttcggaaggcccgacgccttgagcgccagataggtcagcgtatccatcgggttggctaccacgatgatgatggcgcggggcgaatatttcaccacgttctcgatcacgcccttcatgatgttggcgttggtgccgatcagctcctcgcgggtcatgcccggcttgcggggaatacccgaggtgatgactaccacgtccgaattggcggtctgcttatagtcgttggtgacgcccacgagcttggtgtcgaaatccatcagcgtcgagcactggtacatgtccagcatcttgccttccgaaagaccttccttgatgtcgatcaggacgacttcgctcgcaacttcgcggcaagccatcacatttgcgcaggttgcgcctacggcacctgcacctactactgtaactttagacatagctttttattttttgtgtttagcctatcagcttttcgtaatccgcggcgctcagcagtgcgtcgtactcggccgggtcggtcatcctgaccttgatgagccagccttcgccgtatgcgtccttgttgacgatggcggggtcggcatccacggcgtcgttgaattcgagtatctcgccgccgatgggcaggaatgcgtcgctcacggttttcacggcttcgatcgagccgaatacttcgcccgcggcgagggtttcgcctacggtcggcacgtcgacgaagacgatgtcgcccaattggctctgtgcgaagtcggtgatgccgattacggccgtgtcgccctcgacgcggcaccactcgtggtcgttcgagtatttcagatttgcgggtacgttcatggtgtggttatcgtttaaaattcaaatgcggttttttcattgcaaatataactgttatttccgtaacagcaaggatttatgttatatttttaactcaataaccgtaagggtatccgaagtttttgggatgtcgtaaatatttgttaattttaaaacaacttacgtcacgacggaaaccctgaaaccacagcctatgaaaaaacgatcctatttgattgccgcaggatgtactgttgtcctgtatgccctttcggcctgttccgatcatgcggcgaatgataccgcgcaggccggaaatccggaaactatgtccgtggccgaggcacgccgctatttcgagcgtgttgcggcaccgaccagagccgggagtgaagaggggacgctgacgctcgggacttatatgcccgactggtcgctggcgacggtctcggccggggaagtgctttccagtaccgatgtgcctgtccggggcgagttccgctattttcgttatcggatcgacgagtacggcgaaccgcgttttaccccgatctaccacaaactggtcgtcgtaaaggattcccgcagcggtgtcatgagcagctatctgcgtttttatgttcccgatccggactatgccgcggggcgcacggccgacgactacgacaggctgctcaacagcggctccaagggggatttcaccgggctggcggtttacacctcgctcgacggatttccggttcatgcggttcgttatgccggaggagcatgccaggctgaagcgttcctttacgataagtcgcggacacaggcggaaaatactgcccgcctgggcgaaatgctggatggcctgagtgtcgtgtgcagccgggaaacagcggtgacacgtgcggaggcggagtcagagaaaagcgagccggttgacggcggcggtatagaggcggttgtggtttctgccaagcgccctgtaaaccatatcaaatatgagcgtttggatacggatcccgtcaagcctaccgaagaggatcggggcccttcgggcagcggtggcggcggtggcggtgcctcctctaatccgggaagtccggccaacacccgttatcgggaaaatgaaaatataatgcttgcttccgacagcagggaaaaactggaaccgttgctggattcgttgcgccaggattgcatggccgggaagattatcggttcgatccgggggaatgtaacgatccgcaccggttttttcggaagttcggtgatgatcccgactgcctatactttcgaaggcggtaccgtatgggacgatttcgagatcaggatggggtctcggctcgacgatatcactttgctcgaagagcttttccatacgcaccaatgttcgggcaaaacccccgaagagtacaggggcatgcggctcaataacgagatcgaggccaaactgtgctggtatatgtatcggttgaaaatcgggaatatgaacggagtcagtaaatatatcagtgaaggcgaggggcgacggatatttggaactttgagtaaatatattatggccggaaatataaaaagtgataattttcgagaagaatatcggaatgccgcgtccttgctaaggagtatgagccgttcatacgcggatgttacgctatatcctttttccgaggatgctgtgaacgtcgatgttttaatgaaaatgatggaggattgtccggaatataaaaatgaatagcatatgaaaagagtatttagcattattattattttggggcttggatcaactgtttccgctcaggattactatacgggccgggatcgtattactgcagacgggattacatttttggcttctgtctaccagggcgtaattctatctttggccaatataaccaatacccgggaaaatgcaccggaagtttataaggatggcagccctatcgaaccggaattcgaagaatacgccgttgcgaatacgatccccggatgtgtggaaaaggcttttacagagacttttacacgggaggagtatgaactgttgcgaacagatgcagaagccgttcttacaataggttatgtcatttcaccagcgggtgttacggaagaagtttcgtttacaatagattatgttccttgcatgttgagtattcctccggagaaatatgccttgctggaaaagaatctcaagcgatatgtgaaatgggacgttaatcttttcggccggaaattgcagtttatgcatgggatgagttttgtcaacttttcgaagatacgccttcaatatccgtcatcggaacctgaaattccggacttgacggtgccgacagggccccgcaatcccggggatgaagagttgaaacctgctccgtggaattgacgttgcctgttcgagcgtacggccctccgggagttttgcgatcgattctaatgattatggcaattcagcttttcccggcgatcacgaattcgatctcccggaagaggtatgcgtgccgcgtgccgtcggcgtggcgcaggatcagctcgcccgaggggcgtacgccttcgaggacggcctcgacgagcgtgccgtcggggcggcggtaagggtgggtttcgcccagccggtacatgcgtttccggtactcttcctgcaaggctgccttttcgccccgtacgagctggccgtagcggcccatgcagcaagcatggaaggattcgagcacctcgcggcggtcgaacgtgcggccgctggcgaccgccatcgacacggggttgggcagtgcggggtcgaacgcacgctggttgacgttgatgccgatgcccgcgatcgtccgcgcgagggtcgggcccgaatagctgtgctcgatgaggatgccgaccagttttttgtcgccgacatagatgtcgttcgtccatttgatgcgggcgtcgatgccgaaggcggcgaaggtgtccgtaagcgccagcgtgacggcttcggagagcaggaactgttcgccgacgggcaggaacacgggctcgagcaccagcgtgaaggtgaggttctcgccttcggggctcgtccacgaatgcccccgctgcccgcgcccggcggtctgccgttcggcccagacgatgtcgccgtggcggtattccggccgcttggcgtcgtcgttggtcgaggtggtttctgcgatgcggtaaatcatgttattgcttgaaaagttctccgagggtttctgcgagcgccttgccccgcagttcgcgggcgacgacttcgcccgtcgaacagtcgatcaggtagttggtcgggaatttggtgacggagtagaggtcgcagacacgcctgtcggcgtccgtcaggttaatccacgccatcccgtcttcggcgatggcttttttccatgccccggcgtctttgtccgtcgacagcccgacgacttcgaatcccttgtcgtgataggcctcgtaggcagtcctgatatgcggcatctcgctgcggcagggcacgcagtcggcgaaccagaagtcgagcaggaggtagcggctgcgtttcatgacctggcttaacgtgaccgggttgcctccggcgtcgttcgccgtgaaatccacgtatcgggcgagttcccgcgaccggagcacgcgctcgatatgttcgagggggcgtttcatcagccggcaggtgcgcaggtgaggcgggaagaggctgacgatcgaatcgacccgggcccgcgaaatgtccttgtcgtagtggataacgccgtcgaccatcgccactccgaagatattgtcggtgttggccgcgaggttgcgcgccgaggagccgatcaggctgtcgagcagcgcggcgcggtaggcctggtcgtggtcttcgaaattgtaggcatgcagcgcccggttcacgaatcgcaggtgcgccccgaaagcgtcgttggccggggtgccggagggatagtactcgattttgtcgtggttgctggactcctcggcattcaggcgtccctcgatgcggatattgcctggctcgatatagagcaccgcggcggtttgtccgtttttacgcacgagggcggctgccgtcggttcgtcgtagcgccccttgtaacggaacgagccgtcgggggcgggaaacacggcgagcgtgtctttcgtgacggattcgaccagtgcgaccgagtcgttcagcccctcgatatgtcccgtaagggtatagcggaagcctgtcgggcggcatccggacagcagtgtcgcggcagtcagcaggagcagtgtctttttcatggggcggcggttcgcagaccggggttataccgatacgccgaaatcgcgcagggcgtcgttcagcgaggtttttttgtcggtggactccttgcgctggccgatgatcagcgcgcaggtgatgctgtattcgcccgcggggaactgtttgcggtagctgcccgggacgaccaccgaacgcggcggcacgtaacccttggaggtgacgggctccggccccgtgacgtcgatgatgtgcgtcgagccggtgatgacggtgttcgaaccgagcaccgcctcgcggcagacatgcgccccctcgaccacgatcgaacgcgagccgatgaagcagttgtcctcgatgatgaccggggcggcctgcacgggttccagtacgccgccgatgcccacgccgcccgataggtggacgtgcttgccgatctgggcgcaggagccgaccgtggcccacgtgtcgaccatcgtgcccgtgccgacataggcgccgatgttgacatacgacggcatgaggatcgcacccggggcgatgtaggcgccgtagcgcgccacggcgtgcggtacgacgcgcacgcccagctcctcgtagccgtgcttgacctccatcttgtcgtaccactccagctccccggcctgcatcttgcgcatgggctggatcgggaaatagaggatgacggcctttttgacccactcgttgactttccattcgcttttggccgggtcgacgggctccgccgtgcgcagctgtcctttgtccaccagttccaccacctgccgcacggcctgccgtacgggttcttcgctgagcagttcccggttttcccaggcctgttcgattatctttttgagttcgctgtacatgattttcggttgtttttgcaagccaaagttacgcaaaaacttcggtttcccggcttgtagggtgaaaaataacccttttgcaggccggtaaggggaaaaatgtgtgtggtttcttattttttcctaactttgccacgatattcacccaaactccggaatgctatgatgaaattgacacgcaaggccgtggccctcgcgggggcggcggcgatgatggcaagttgcaaccacatgaagcagataaaacacatgccctaccccgagacgcagcgcaccgacgtggtggacgactatttcgggacgaaggtcgcggatccctaccgttggctggaagacgacaattcggaggcgacggcggcatgggtcaaggcccagaatgccgtgacgcaggattacctgtcgcagattccgttccgcgacgcgatccgcgggcggctgacccagttgtggaattaccccaaggagggtatcccggccaaacacggcgatgcgtggtactatttctacaatgacgggctgcagaaccagtcagtgctctaccgtacgacggcccccggtgcgcaaggcgaggtgttcctcaatcccaatacgctctcggacgacgggacggtggcgctttcgtcggtggctttttccaaggacgggaaatactgcgcctgcgcggtggccgaatccggctcggactgggtcgagattcgtgtgatgaacaccgccgaccgcacgttcacgaccgataagatcaactgggtcaagttctccggcgccgagtgggcgcccgattccaaaggattctattacagcgcttacgacgctcctgaaaaaggagtgttctcttcgcagaaccagtttcagaaagtctattaccaccgcctcggcacgccgcagtcggccgacaagctgatttatatggatgccgaacatccgctgcgttacttctcggcatggccctcgaaggacggcaaatggctcttcatttccgcttcggaaggtacgtcgggaaccgagatactctataagaaagtttccgagccgaaattccgcacgctgctgccgggcttcgatgccgattacgcgctcgtagagtgccgtgacgaccggctctattacataacgaacaaggatgcggcgaacaatgcgctgatgaaggtcgacctgaacgacccgtcgagcataacggcggtcattccggaaaatgaaaagagcctgctcgaaaatgtgaccgccgccgggggatacttcttcgcctcttatctgcaggatgcgcagagcaaggtcgtccagtacggcttcgacggcaaaccggtgcgcgacatcgaactgccgggcatctgcaccgccgcaggcttcgacggcgacgacgaggcagccgaaatctattattcggtatccggctacacggctcccgccacgatctataagttggatgtcgcctcgggcgaatcgacgctgttcaaggccccggacgtgaatttcgatcccgcgctgttcaccaccgagcaggtgttctacacctcgaaggacggcacgaaggtgccgatgttcatcacacaccgcaaggatctgaagctcgacggcaagaatccgtgctacctctatgcctacggcgggttccagatcaaccgcacgcccggtttccgtccctcggccatcatgttcgtcgagcagggcggcgtcttctgcgaagcgaacctgcgcggcggctcggagtacggcgaggcatggcacaaggccgggatgctggagaacaaacagaacgtcttcgacgatttcatcgcggcggccgagtacctgatcgccaacaagtatacctcgaaggacaaactcgccatcgcgggcggttcgaacggcggactgctggtcggcgcctgcgaggtgcagcgccccgacctctatgccgtctgcctgccggctgtcggtgtgatggacatgctgcgttaccacaaattcacgatcggctggggctgggccgtggagtacggatcgagcgaaaacgaggagcagttcgactatatctataagtattcgcccctgcacaatatccgcgagggcgtgcagtaccctgcgacgctcgtgacgaccgccgaccacgacgaccgcgtcgtcccggcgcactcgttcaagttcaccgcccagatgcagcattgccaggcgggcgatgccccgatcctgatccgcatcgagtcgaaggccgggcacggcgcaggcaaacccacttcgaagcgtatcgacgaggaggcggacacctatgcgttcctgttccagaacatcggggtgccttataaatccgttgcgaagtagttttcggtatattgccggctgccttcactggccatggaaggcaccggccgatttttagtcaggttagtaaaataaggtataatgaaagtctataaattcggaggtgcgtcggtgaggaatgccgacggggtgcgcaacctgcgcaagattatcgacgatgagcaaaacctcttcatcatcgtttcggccatgggcaagacgaccaatgcgctcgaaaaggtgttcgagggggtgcagaagggcgacaaggatctttcgctggagaatgtcgcggcactgcgcgagtaccatgccgggatcatcaacgacctgtggcacggcccgaagaagctggagaaggtcgatgccctgttcgacgaactggagcgcgtggctgtcggtacggtctacaagcccggggatgccgaactgtggtacgatacgatcgtggcgttcggcgagctggtgtcgacgaccatcatttcggaatacctcaattatgccggggtggcgaaccgctggatcgacatgcgccgctgcttcctcacggaacagcgccacaaggatgcgggggtcgacctcgaggcttcggagccgctgctgaaaaacgcactggccgagtgcgtcgagaacatcttcatcgggcagggctttatcggcggggcacccgacgggacgaccacgacgctcggccgcgaaggctcggactactcggcggccgtggtggcgaacatcctcgacgccgagtcgatgtcggtatggaaggatgtggacggcgtgctgaatgccgaccccaagattttccccgacgccgagcagatcgccgagctgaactacctcgataccatcgaactggcatacagcggcgcgcagatcatccaccccaagacgatcaaaccgttgcagaacaagaatatcccgctctacgtgcgtcccttcggcgacaaacgcaagccgggcaccgtgatccgcggcatgtcggcgccggtcgtcgtgccgatcctgattctcaagaaagaccaggtgctgctcacgatccgctcccgcgatttttcgttcgtgctggaggagaagttcgccacgatcttctcgctgctggagcgtttccgcatcaagaccaacctgatccacaactcggccgtgaacctgagcctgtgcgtcgataattcgtggcatatcgacgaggcgatcgaggcgctgcgcgaggcgggcttcgacgtgatgaaggccgagaacatggagttgctgaccgtgcgcggctataccgacgaactgtggcgcaaatacgcccgcggcccgcaggtcttcgtgcggcaggcgacgcagtccaccgtgcgcgtggtgcgcaagcgcagttagcggcgggatcggacggggatcggcggatgcgccgtgcctgtataaaaccggaagcggccctgcggggccgcttccggttcgctattttatttccgagccttgccgcatgttgcgcagcaccgtccaggtcgagtcgtcgcggatcgcgccgctgcgtttcatgttccagatcgtgcgggcgatgtatttttcgatgtcgcgctggaggcgcttgtaaagcgggcatttggtgtagttctcgttgtcgagcagtacgtcgcggatcgaacgcagcgagttggtgtagttcgccatctcgttcttgagcgccacgccctgcttcttcgaagccgtgatcttggcgatcgacatcgcccgcaacttctcgcacacggagttcagcaggatcatcaccacgttgtccatcagcgtgtgcccgtgcatgaacaggtaggcgttctcgggtgtcaggccgcggcccttgagctgctcctcgaactccttcatcggctcgatcatcttcgggttgcgcctgcggagcatctcctcgcgtttggccacgttgcgccggagccattcgagcgttttttcgccgttgtccgccaggtcgaggtagccgatgcgcaccgctgacttgaagtcgatgagcggaaagacgttctccgaggagagctgcgctgagtaggcgtaccagaggaacagcgggtagatcgtgcaggaatattcatgcatgaaacgcacgaaatcgaagatgcgggtgtcgtttttggtggccttgacgcagatgttgtgcagcgagggggcgtagcagaggaagttctcggtggcgtaggcgtaggtgtggaacatgtagcgggcgttgttgacctcgcgcgactgctccgtacggtcggcgaacaggaagtcgaaatccgagtcgacgcacaggatcagttcgtccgacgagcgggggatcatgcccatcagcaccttcttgcccttgggcaggtcggcgcggttgggaaccgagatttcgaaacgcatgtaggggttctggaagtggtcgaagatgccgcgccagaaagccacgtcctcgtagccttcgacataaaccctcacgagccgctggtcggggttggccggcagcggtttgggcagctcttcgagcgtggccgggcgcgtgaacgggtttaatttgcgcagtttttcgcggaactttttcgccatacgctaacaaaggtaatattttattatttttgcacaaaataagacgtcctaaaaggacgttcgattcctactattcgaacaatatggcagacaacgattggaaagcgaggctcgggatggtctactcgaccaaccccgattttcaatatgacaccggcacggcccaagggcccgtgacattgcccccggcgcagcaggatctgcgcgtgtggctcgaccgcaagcaacgcgggggcaaggtcgtgacgctcgtcaggggtttcgtcgggagcgacgccgacctgcacgaactggcacgtctgctcaagacccgatgcggcgtcggcggcgcagccaaggacggggagatcatcatccagggcgaccaccgcgaccgcgttgtggagatcctcgccaagggcggctaccgctgtaaaaaagccggctcctgagatgcgcaggctgctgtataccgtactgttcctgtgcgccctgggcgtcgcgccgaaagccggtgcccagtattatacgtggggttccgatcccgcgggactgaagtggagcacgatccgcacgcccgacgtgcggatgatctatcccgataccgtgtcgggcgtggcacgccgcacgctgttctacatccgcaccgtgcagcccgacatctcgtacgggttccgccacggccccatgcgcatccccttcgtcatgcaccccgagaatttccagtcgaacgggctggtgatgtacctgcccaagcgtgtggagttcctcacttcgccggccatcgacggctattccatgccgtggtacaaacagctcgtggcgcacgaataccgccatgcggtgcagtataacaacctgaatcgcggcgtgatacgcgccctgagctacatcctcgggcagcagggctcgactatcggcctgttgtgcatgccgatatgggcgatggagggcgatgccgtgatgtcggaaaccgccatgtcgtcgttcggccgcgggttgcagccttcgttctcgatgggctaccgtgccatgggacgcgtggggcgcgattacaaggggcgccgcgaccgccgcaacatcgacaagtggttctgcggatcctaccgcgactatatccccgaccattacgaactgggataccagatatgttcttatgcctatgcgcgttacgacgagaacgtgtgggacagggtggcgtggttcggttcgcgcaacccctacatgctggccaccacccgcatcgcgctcgaaaaatattacggcacgaacgtccgtgagcttttccgcgagaccttcgacgcgttggaacgtcattgggattcgctgccccgaaccggggacagcgccgcgccgctcgtacccatgcccgagggaaactacacgacctaccagtggccgctgccgctcagcgatacgacggtgttggtgctcaagaccgattacgaccgtccgtcgcgtttcgtacggctcgacacccgtaccggtgccgaggagccggtgtgctatacgggcctggtttcgacccgccccgcgatgtccggcgggcgcgtatggtggacggagtaccgccgttcgaagctcttcgagcagcgggtcaactcgcagctttgctacatggatctggagcgggggacggcacgtactttcgccgggcggcgcaatgcgctctatccgacgccggcacccggggaactggcctgggtcgagtataatcccgacgggacttactgggtcgtggtgcagcgcgacgggcagcccgagcggcgtttcggcacgccccgccatgccgagatacacgggctggcgtgggacgacgtgacgctggcctactatgtcatcgtgaccgacgacgcgggcatgtggctcggacgcatcgacgacgaaggagtgtcccccgtcactcaaggggcttatatcacgctgagcaacctcagggcgggcggcgggaagctctattacggctcgatctcatcgggcagggacgaagcccactgctacgaccttatggcccgccgcgaataccgcatcaccacgtcggccttcggttcgttttcccctgcgccgtggcacgatgccgcggacggaggacgggtgttgctgaccacgtatgaccgcagggggtaccgcgtcgccgcacagcgggtcgctgacagtgtgctgatcccggtcgccccctcgaagctgcctctcaacgtcgtgaaccccgaacgcaagcgctgggacgtcgtgaacctcgacacggtgcggttcaccggagccgattcgctgcgccagtgcggcacgttccgcgccaggcgctaccgcaaggtgcccaacctggtgaacgtacacagctggatgcccgtggcgttcaatcccttcgatgccgtggacgagcataatatcaacctcaatctgggcgttacgctcctgtcgcagaacctgctgtcgaataccgaggcctatgcctcctacggctggaaccgcaacgagggttcgctcttcaacctcggggtacgttacttcgggctgggcgtgcacctcgatctggatacgtcgtacggcggcaaccagctcttctattcgctggtgtcgtacgatccgaagacgggcgaccccatttaccagaagcgtcccagtcccgacaaatactactccatagggctctctgcgacgctgccgctctatttccagcgggggtatcacacccgccagctgtcggtgtctgccggctggaactattcgaacggcatggtcgccaacctcgacaagatcgaatgggacggcgggcagatcaccaatatccagcgcatcggtttccgcgaggggctgcacaaactctcgttcgggctcggctattccgaccaggtgcgcatggcgcaccgcgactttgcgccccggtggggctatacgctcagcacgctgtatacgttcaatcccgcgaacgtgcatttcagcgacctgatctcgttcttcgggcaggcttacctgccgggcctggccgcccacaactcgctgaaagtggcggccacttaccagacttcggtcggcggctacaagttcccggcgggctatgcgcccctgagctacaagtcgacgcggctcatcccgcgcggcttctcgtcggccgacatcgtgtcgaacaattatacggccgtgtcgcttgattaccagttgccggtgtggtatcccgagggcggcatcgggtcggtgctctatttcaagcgtatccggctcaacgcaggcggcgactacgcacagttccgccgccctgcgggcaaaggcatggattggcggcggatatggtcggtcggcggcgacatcgtgttcgacatcaatgctttccgccagcctgcatcggcgacgtcgaccttcaaactgtcggtgtaccatcccagcagcgggggcgtttggtgggccgcggccgtggggctgccgttctgattgtaataaattttgtatctttagcgcaaatttcaggcctatggcacaaaggaaaaaggcgggcatcagcccgaaaacgataaaatggatatggggggtggtcttcgcaccctttgcgttgctgtcggtcatgttgctgctgacggccctggggctgttcgggcgtatgccttcgttcgaagagctggagaacccgcgcagcaacctggccaccgaaatctactccgaggacggcaaggtgatcggttccttcttcgtgcagaaccgttcttatgtgcagtacgaagacctttttccggccgattcggcattccacatccggctcgacgggcatgacgtgccgccgatcgtcgcggcgctgatcgcaaccgaagacgcccgtttccgcacccattcggggatcgacatcccttcgctggcacgtgtggcggtgaaaaccgtactgttgcagaatacgtcgcagggcggcggttcgaccattacgcagcagttggccaagaaccttttcccgcgcgacacggtgcgcaaccgggggcgtatcgtccgttcgtcgaagctcgtcgtgtcgaaactcaaggagtggatcacggcgctgaaactcgaatacaactatacgaaggaggagatcgccgccatgtacctcaatacggtcgaatacggttcgaacgcctatggcatcaagtcggcggcgcagaccttcttcaacaaggagccgcacgaactgaacgtgcaggaggcggccgtgctggtgggggtggtgaacgccccgacgcgctattcgcccgtgcgcaaccccgagaatgccctcgcacggcggaacctggtgctttcgcgcatggaggatgccggggcgctgacacgcagggagcgcgactcgatcagcgccctgccgattgtgctcaactacaagcccgtgtcgcataacgagggcacggcgacctatttccgcgagatgctgcgccttgtgatgaacgccgagcgccccaagcgcaaccagttctacaccgaatgggattacgaccaggccgtgaaggagtacgaggagaacccgctctacggctggtgccgcaaaaaccgcaaggccgacggtacgccctacaacatctaccgcgacgggctgaagatctatacgacggtcaactcgacgatgcagaaatatgccgaacaagccgtgcagaagcagatgcagagcgtgatccagccccgtatggacgcgcagtaccgcaatacgaagaccctcttcatcgacgcgacgcgcgaggagagggagcggatcatgcggcatgccatccgttattcggatcgctaccgcgagatggaggatgccggggcgagcgcgaagcagatcatggcggcgttcgacaagccctgttcgatgaaggtcttcacgtaccggggcgagcgcgacacgctgatgaccccgcgcgattcgatcctgcaccacaaacggatcatgcgcgcgtcgttcgtggcgctcgatccccgcacggggtatgtcaaggcgtatgtcggcggccccaacttccgctatttcaagtacgacatggccaagcagggcaagcggcagatcggatcgaccatcaaacccttcgtctatacgttcgccatcgaccacctggggctgacgccctgcacgatggtgccgaacctgcccgtgacgatcgagacggccaacggtacggcctggtcgcccaaggaagcgggcaaggtcgagtacgacggcgtgatgcacccgctgcgctgggggctcgcccgcagccgcaacaactattcggcgtggatcatgaagcaggccaagcagcccgccgccgtggccgactttatccataacatgggcatacgcagctttatcgaccccgtgccggcactctgcctcggttcctcggagtcgaacgtcttcgagctggtgagcgccttctcgactttcgccaacgagggcgtgcataccgatcccatcttcgtgacgcgcatcgaggacaggcagggcaacgtcatcgccaacttcatcccccagtcgcaggatgccgtgagcgagcgcacggcctatacgatgctgacgatgttgcaggacgtggtcaactcgggtacggccgggcggctgaaatggcagttcggcctcaacgacatggagatcggcggcaagacgggcacttcgaacaagaaccgcgacgcatggttcatgtgcgtggcgcccaaactggtggccggcgcatgggtcggcggcgaagaccaggcagtgcatttcgtggcgggcggcgagggcagcgtgatggcgctgccgatcgtgggcgacttcatgaaacgggtctatgacgacgggcgcctcggcgtgagccgtgccgatcagttcatccgcccggcgatgatgccgcgctacgactgcgacgaggaggtcgaccccgacgaacgccctacggagcccgggatcgctgaagacgacaatttcttcgattgatatggatccggccggccgttgtgccggccgatttttttgcggttcggcccgaaatcgctatatttgcccccggagcttccgtgtacggtttgtccgagcgggaacgatggtcattttttaacgatatgaagatgaaaattgcgattgtgggcgccagcggggctgtgggccaggaatttttgaaaattttggaggaacgcgacctggggatcgactccctgttgctgttcggttcggaacgcagtgcgggacggacgtataaattccgtggggaagatattaccgtcaggctgttgcagcacaacgacgatttcaagggggtggatttcgccctgacgtcggccggcgccgggacatcgcgcgagtttgcggagacgatcacccggcacggggccattatgatcgacaattcgagcgccttccgcatggatgccgacgtgcccctggtggtgcccgaggtcaatccggaagatgcgaaggacgccccgcgccgcattatcgccaaccccaactgcacgacgatccagatggtcgtggcgctgaaggcgatcgaggatctttcgcacatccgccgtgtacacgtttcgacctaccagtcggccagcggggcgggtgccgcggcgatggacgaactggtcgcgcagtatgccgagctgggggccggcaagcagccgacggtcggtaagttcgcattccagctggcctataatgtaatcccccatatcgacgtgttcaccgataacgactacacgaaggaggagatgaagatgtttcacgagacacgtaagatcatgcattcggacatcgccgtgtcggcgacatgcgtgcgcgtgccggtgatgcgtgcccactcggagagcatatggctcgagacggagcgtcccgtgtcggtcgccgaagcccgcgaggctttctccagggcgcagggtgtggtgttgatggacgacccggcgggcaaggtttacccgatgccgctgtttatcgccggcaaggatccggtatacgtggggcgtatccggaaagacctgacctgcgagagaggcctgacgttctggtgcgtcagcgaccagatcaagaaaggggcggcgctcaatgccgtgcagatattggagacgctggtctgacggccgggaatttaaaaaacaggaaaagggggaggctgcgggtctcccttttttttatatctttgttcccgacgtaaagttcgtgccttatggaatccaagttttcagcccgtcttgcagagttgcccggcccggtgtgggtgttgggggcttatgtcgtttcccggctgggggagtgggcgttcggtctgctcatgcagctcgtttcgggctcgtggcggctgggcggcggcacggctttgctttccctgatcactgcggccggtgtggcgctgcccgtctgcgtgctgtggggcttggccggccggagcccctacgggttgtcgctcgcccgctggtatgccgggctgcgtgtggtgttgcatttcgttgcgctgctcatgctgctctttgccggatacgacccgcatctgtacggagataccgaaatgtttatccggggcattgcccggaatgtcgtatggggcgccctgtggttcctcttcctgctttatctggagcgctcccgtgcgctggatgccgcgatgtccggggagcgccgcaacctgcccctgtggtgcgttgccctgatggtcgtggtgttggcgatgacgatgtagggtatgctgccggagcccttggctcgggcgtgcgcgctttattctgcctgcaatcggagaaggcccgttgccgggtcttcgtatggcacattttgggcctgaagttagcgaattagaattttttgtcgtaatttagagtcgcaacagtcccgaaaaagaggtgctgaagttgtattttccgaatatattctatatatttgtgatacatactgactaacacggaaagtgtaagtttattctcgagtggtaaatcttgcaaattaatactgagaagagaataagccagcatttctccgcgtcttatccgtttacggatataggcgtgggactgttgcttattttattctcgaggttttgcaagaaccttcccactctgaaatatagctacagcaccacgctttcctttttttaattttacttgtattgcttagtccccgggtgcgggggactgcggctgccatgtcccgtcataaagagtgtgattgcctaacccttttaatcttagttatatatatgaaaaactgtttcaaaactgtcttggccgctgtggccgtgcttgtttcgctgggcgcctcggcccaggacgatccttcgaaggagactgtcatcatcaatccctttacgcacacctccgctgtcagccaggcagcctgtgacaacatccgcgcggccgtcctgtcgggttttgccgaccgcggccgtttccacatcgtcgacgcactgaccgacggtacgctgtcgaagctctatgccgaccgtaacgtcgaggacgtggtgaacgatgccaactggaagaccgaaagcgaagccgcctacaaggcgttgggtgccaggaaggttgtcatcggacaggccaacaacgtttcgttctcgcagttcaagtcggatatcgacggcaagatgtacaacaaggccgaggtgacctattcgctgaaggtatataacattgccgacggcgccatgatcggttcggaagacctctcggtttcgggtatcgacgccgattcgaaggacggtgcattcaacgacgcgatgaaagacctccgcaagggcatggtcgggttcgtggacaagcatttcaagttcgagacctatatcctcgagctgggcgaggctgacaagaagggccgtgtcaaggagctctatatctcgggcggtacggagatgggcgttgccaaaaagacccgtttcaaggtgttcctggagcgtaagatcggcccgaaggtaaccaagtcggagatcggcaccatcgtggctgtcgaggtgatggaaggcgttaccaaatgccaggtcgcttcgggcgaggacgccatcaaggagaaattcaacaacggcgacaaactggtcgtcatcctcgacaagcaggggacggcggcaggcggtttcctcaaagggctcgtcggtgcataaatttaccgcatataattcttttggaaacgatctccggggtgtcgctgatggtaccccggggattttatccgttcaaacttaaaatatttatcagatgtttaggaagtccgtattgtcagtcatcgttgttctcttgtcggcgctttttcccgcctccgcacagaattatacgaccgatgccatcctgaaacgcacgaccggaaagatcgctacgctggaatgttcggggatcgcccgtacgaagaaggaggcgatcgagatggctaagaaatcggtgatctacacttatttatataacggtatagacggcctgaacgacaacaaacccctgttgggcagcaaaccctcggccggggcggcccagtatgtcggacagttgctcgggacgacccgttatgccaactacatccgcagctgcaccatcgccgacaagaccaacaagaccgtcgccaaggacatccaggtctttgcgacgatcgacctctacaccgaatcgctcgagcgcgacctggtcaacaacggtatcatcgggcgcaatgccgccgatatagcgctctccgaaacccaggagatgatcgccatgccgacggtgatggtcgtgcctttccgcaagagcggccagtcctacgaagaggccatccgcgacaattcggatatgcgcatggccatttcgaaggtcaacgaaggtttcatcaagcagggcgtggagaccaaagacctgctgacgtcgctcaataacgccaatacctatcaggtgcgcatgggcgacggcatgtcgctcgacgatgcgatcctcatcaactcgggtgccgacgtctcggtgagcgtcgatatcaaccaggatgtgaacgacggcggggtgcgcgtgtcgctgaccctgcaggcgatcgagatcgccacgggcaatacgctggccaccaaatccgaaatttcggggcgcaaacgcacgacggccgacgtgctgtgcggcgtgatggcgcaggcgatggtcggcgacttcatgaagcagatatccacacgcatggcgaccaagatttcgaccgggcagagcgtggccgtgcgctttacgatcgaccccggatcggccatcaacatggataccgagatcaacaacatcatgccgttgtcggacatcctcgtttcgtgggtgaagcgccatgccaagaacggcaagtaccatacgcagggccgcacgagcacgctgctggccttcagcgatatttttgtggacaactccatggaggacggtatgcagtcggacgtcaatgatttcgcgctggcgctctaccagtacctcaaggggctgaacctctccgtgtcgcgtacgatcacgggtaattccatcgacgtaatcatctactaaacaacagaccatgaatctgcttcgtaaactatcgttctcgctggcgttcgtgctggccgcgctgtcgctccgggcccaggccgtaatcgacctctcggcctatatcgacgatgagacggccgcgcagctgggcgacaacaatgccgcggccctcaaaaacaagatcagcaagatcatcacccgcaacggcatggccgatgctgcggggcttttcgtcgtcacgccgacgcttacgatcaccgacgacggggcggtcgatacggggatgaccacgctgcacgtgctgcgtgccgacctgaccctgtcggtcaaaaaccttttcgaagatactgttttcggaagccagaccatatcgctccaggccaacggcaaaagcatggaagcctgtatgcggtcgctgatcaacaaggtgaacgtcaacgacgcgcgtttcgccaagctgatcggtgacgtgcagcagggcatcgccgactattatacgcgccagatgccgaagatactcgccaaggtcaactcgctcgtcgcccgtgaggagtacgaggatgcgatggcggcgctggccgtgattcccgagagtgtcgacgaatacgaggcggtcgaggagctcaaggtgcaggtctacgacaaactgctcgccggcgaggtgacccgtgctgttgcccaggccgatattctggtgcgccagggcgatatcgacggggcgctggagttgtgccgtgcatgcaaccccgtgagcccgaactacggcgaggtgatccggttcctcaaccgcctcgatgcgcaggctgcggcggccgaagccgcggcgatggagcaggagttgcggaaaatggatgccgaggcaatgcgcgcgcggacgcagcaggaggctgccgtcgaggcgcagagcctcaaggccgagcgtgccgagtcctctgccaagaagggcaagtcgctgggcgaatggctcttcggactctgatcgaacgattgtctgattaatctggaagtacgatgaaaacctgtcctgtctgcggaaatagaatggaggattcgcagcacctatgcccggattgcggcgccgactacgtcgaggccgtcgtcaacgatattgcctccggtgcgggggcggattcccggctgatgctcgcgagcctcgaagaggggcttgccgggctggatgccgtgccgctgcccgccctgggcgatacggcccgtaagatgctccctgcgctgtgcgctgcggcgctggtattttgcctgctcgccggggtcgctacgggcgccaatatcttctacctgctggccgccgtcgcgctggtgccgctggtcgtgtcgctgcttgcccgtatgcaggggaaactgcggttgagttccggcgaagtggtcgtaagggccgccgcgcgggtctttgccgaggatgctgcttccgtgcgggagaggtttgccggagatgccgaggtgctggcccggctcgatgccatgcagctgcggctggatgacgcccttgcacggcaggcgtcggcgcatgcgcaaaaccgccgcaaggtgacggtcattgcggccgtcgtgctgatttgctgctctgcgggtgccggggcattggccgtgcgcaaccatgcggcccgcgaggcccaggccgcctatgcggcgcagcccgagtgggtcaggttgcgcgacagctacgccgacgcggccggcgacgacgaatatgcgggcaaagacctgcggatcgccgtcgtgcgtgccatgctcgccgacgggcagggcgctgcggccgaggattttttcttcgcccattgccagggcaaggtcggggatgccgattgcgccatgctgatcgccggccattataaggcgaagaaggatgctgttgcgctcgacgcctttgccggcaaagtgtcgctgcgctacgattccgatacgcaaaaggttaaatccctaacgaagtgacccgatgaagcgtttattatctatttcgctgcttttggcggcactctgcatctcgacggcggcttttgcccagaaggacaaggtcgtcgaggcgagcagcaaacggaagccggcatggatcggcagttccgaccggtcgcattttgcggtgacggaagtgggggagacccttgccgccgcctcggggaaatgcatggcctcgatccggcagtatatcgtcaatgccgtggccgtgaatgtctcgtccgtcgagaagatggcgacgcgccagatcacgcgcgaccagctggtcacggcgatgagcgactattcgtcggcgctgatgaccgaggccgggcagctgccctacctgaacaacatcaccctctcgaacgccgaggcggtctactgggagcggatatacagcaagaagaccaagacctaccgctatgaatattcggtgctgtaccccttcccggagcagacacggcggcagctgatcgaggctttcgtggccatcgacgacgccaagcaggccgagtatgaacggctgcggcgcgaactgggcacgattacggacatagaccgtatccagctggcggtaaacgagctggacgggttgtacgactatttcttcgacgccacccgcaagggcgatgtcgagaccctgcggcgcaattaccgggcactgtaccatgccgtgtcgatcgaggtggagtccgaggcgccgggcgagtgcgtctattccctgcggctcgacggccgtccggccacgaccgccgtgcagccgcgcctgaaaagcgaatcggtgctggagatggccgtcaagccctatggcgacggccgctacctgctctcctatgatccgcagtacgcttcgccgaccgatatcaacaagatcgaagtgctctacctgttcggcggtgcgcgcgtgtcgcagacgatctttttcaatccggccggggacgccgtttcagtccggcccaagggcacgctcaggatcgaacagtccggcggggtgatccgcgggacgatgcagctgcgcgtaagcgggacggcggccgaggtgcggcggatcgtgctgttcaacccggccgacggggcccggatcgtggctgaaaggatcgaaccctcgcagctcgccgggggcgattgcagcgtaacgttcgaggcgcaaggctcgataagccccgcaaccgacggggtggacgtcctcaggggaagcatcggattcgggaatcccgccgacgggaaggcctccgaagccgattttacattgcactataaacttacaaccaaataatccgaaagatgaaaagaacccttattggagctatcgctctcctgctcgctgccggcgccgtgtcgtgcagttcgtcgaaaaaggcctccgggcccgctgcccctgcgggcatggtcgaagaggctattccgctcagcggcgcacagtaccgcagcaatgccgaatattaccgtgccgtgcagaacggcgtgagcaccgagcgcagtacggcgcagaagatcgccatgcagaattgccgccaggatcttgccgcggccatccaggccgatgtgaagctcgtcatcgagaactatgtgaagaaccaggatacgggcgtttccgccgagcacaagtcgcagtatcaggaactggcttacacggccgtcggccagcagttgcgcgacgtgcaggtcgtcgaggagaagatgttccgccaggacaacggctcgttccgttactatgtctgcatgcagcttcccaaggctgccctggaggcagccatcgaggatgcgatcgccaaggatgccaaactcaacctggaattcgaccgcgcccagttcaaaaagatcttcgaggagcagatggctgctttctcgcagcagtagccctgttggccggcaccatgtccaatcgagagacggcgctcccctcgtccgagggaagccgccgtcttttacccgtaaccgctccgcctatgaaacgctatctgaccctgttgctgtcgctgcttttcgtgcttcccctgccggcgcagtcccgccgggaggcgttgctggaataccaggcgcgccgcaggcaggcctataccgaattccgggacaactaccgcaaggcgtgcgccgacttcatgcgcaagcgctgggaggctttccgcgccgaggctccggtacctgtgcccgaacgccgggaacccgacatccccgttatgaaacacccggatgcgccctctgtgccgacgcaggacaggatgccttacgacaaggtggtcgacctgcccgagccggctccggagatgcccgatgcgcccggaattgcggaaacacctgtgcttcccggcaaacccgccgcgggaaagggggacggggataacggtgtgcagcaggggcggaaacccgccgcggggacggacgacgcggctccggcggtggacgtttcgcgtcccttcaagttcacgttctacggcacgggctgttccgtatcgctggctgcgaaacaccgcttcaacctcgcctcggtgcaggagaacagcgtggccaatgcctgggaaggcgtttcgcgaggttcatacgatgccgtggcggcggagtgcgtggcgctgaaaaaggcgctggggctcaacgactggggctattacgaccttgtgcggacactcgccgacggattctgcggccccaaaacgaacgaatcggtcgtcctgcaatcgttcctgatggccgaggcgggctataaagtgcgcatggcgcgcggcgacggccggctgtttctgttgctggccaccgacgggcaggtctatgcccgtccctatttcaatatcgacggccaggtattttatatcctggacgatgtcccgcgggccgcgtcgtacaatatctgcaatttcacgatccccggggagcggcctttgtcgctggcgatgcccgcgccgcccctcttcgcgcagaaacccgcggcgcccgccgtccgcaatttcgacggcgtggtttcgacgacggtgacggtaaaccgcaacctgatggatttctatacgaattatccgccctgccactggagcatctacgcggccacggcgcttaccgccccggtgcgcgggcaactctatcccccgctgcgcgccgcagtggccgggaagggcgaacgcgaggcggcggaactgctgctgcactacctgcacagggccttcccctacaagaccgacgaagcgcagttcggcgtcgagcggacactcttcgccgaggagatgtactactatccgtacagcgactgcgaagaccgttcgatcctctttgcgcggctggtcaaggatctgctggggctggatgtcgtgctgctctattatccggcgcatatcgccacggcggtatgcttcaaaggcgaggtgaagggcgactacatgcagctcggcaacaaacgctatgtaatctgcgatgcgacctatatcgatgccggcgtgggcgaggcgatgcccgacctgaagcgtacgccggcccaagtcgtccggattgattaaccctttaaaaccgattcgcgatgttttgtcccaattgtggaaagaaatgcggtgataacgaccttttctgcgggggatgcggcaccaggctccccgcccgtccggtgacggcatccccggcggcagatgcggcacccgttgccccggctgtccgggccggaagctgcgcggctgcgggctcgaaggagccggcggggcctatggccgagggcgtcatcttcaccaacctgcaggctctggcccgcaaattcggaaccgatgccgcggcggtgcgcaagttgctcgccgcctatgccgaagcatcggcggcacacggcatccgttaccgcatcgtcgatgccggcgactatgttttcctcaaccccgaggccgggcgcaaccgcgccgtggcgctttcaccggccgattcgtgggtcgaacacggttacctgctggcggactattaccgtttcgggcgcagcacggccgacgatgaaaccaactacctgttcatcgtcggaggcgccgatgtcattcccatgcccgtcctgccgcagtatatctccgatcccgattacagcgatacggacatcgactccgatatcccttatgcctacctgctgggcgagcggacttaccccatgctggggacggccgaaattttccagtacgaacaatatttccatacgggacgcctgccgctggcgcatgacgcgtcgctggacgacctggccggatacctgcgccgcgcggccaaagcccccggttcgatggccgtgggcagggcttacgggcagaccgacctcacgtggctttcggcctcggcttcggtcagcgagcctttccgccgcaatcgactcttccggggcgacgtgcggctcgatgagcgtatctatacgcagaacctttttgtcagcccctgcgtcgagcgttcgatcgtcgacaaggttttcgaccggggtgcggacttttactatttcaacctgcacggcagcgatgccccgaccgcatgcagtttctatgcttcctaccagcagcaatgttacgaggcagtcacgccccggcagctggcgtccgccgagaaaccgaacgtggtggtgaccgaggcgtgctatggcggaaaattccaggattacggccgcggcgagacgatgctgctcgcggcgatgggcgacatgacgctgctctacctggggtcgtcgcgcatcgcgtggggtgcttcgaagagcagttcagcagccgacctggacaatgccgaccgcctgacgaacgtctatatggccaaattgctcgaggggtatacggccggcgaggcattctacatggcacggcagagcttcttcgattataacgacggttactttacgccccaccaggcacttacgatcgtcgagttcaaccttttcggcgatccgttcctgcatgtgggcgtgcgccgggagggggcgaaggcgcatccccgggcggtcaaggcgctggcgaaaggcgcagtcaacgcggtcgtcgaacgcaagtgcgtctatgaagccgctccggcctcgttgctcgaccgggtgcgcagcgccgtcgaccgcaacctgtcgctgatccgcgccgctgtcgaccggcaattgtacgaacagctgggggtcgaaccgcgcagcctgtcgaccgtcacccgcatgaaatacggcaacggagacgagttttatgccttcaattacctgcagacggacggtaccataaagagctgccatacggcgaccgccgacctgaacggaaacgtgaaatcaatcatatcaaccaaatagaacgactactatgaaatgccagaattgtaattccgaactcctggaggatgcgaagttctgcacgacgtgcggtacgcccgtcgccgctgcgcccgcaggccccgtgtgcccgaaatgcaatgccccgatgctgcccgacgcaaggttctgcacgacgtgcggcgctgcggtcgaacccgccgctgcacaggcgtcccaggcgccggacgggcaggctgccggaggcggtgagctcgccacggtgaaacagaagattttctggaatatccagaaaggcgaagtcgcctgccgggtcaatgaatcggagtttatccgctacgattcggcgcaggggctgatcgtaaacgacggcacgacggcgtatatcaaggccaacggcaaggtgctggccgaaatccacgggggcatctacgatttcgtagaccccgacgagctcaagcgcgtactcgaaagccgtacgggcggggctgcggggctgatggccggcagcggccgtttcctgataaacgccctgctgggacgccgcgtgaaggacaagttcgacgacaaggacgctcccgaacggcagcgctcgctcgatgccgtgatcgagagcatgaaacggcacgaggctttctcgctgctgctcaagctcgacaagagtttctcgctggtattcggttcgggaacggccgaggatatggccgagttcaggccgatgtccgtgcgcacgaaactgctggacttgcaggtcggcctgcgcgtgattttccgtatcgcagatttcaatcgtttcgccgaatatttcctgacggacgagcccgtcgccacgacccgcaggattgcggagaagttgcagcccgtaatgcagaatgccgtgcaggccgtgatgcaggatcgccaggtcgaaggcacgtcgatcccggcggaggtcgccgaggcgatcgcggccaggattgccgcttccggcgaccagttctacggccttgcgctggagcgcgtggccgaagtggtggcttcgaacgaagacctggaacgcctgcgcagcctgagccgcgaactttacctttcggagcaggaactcgactacctgcgccgcaccaacgatttccgcaaccgcctggctgcggagaccaattcgcaggctattgccgatgcacgcagcgacatgcagctctatgaggggttgcagcaggtcaataaagaccgcctgctggccgacgacgagctggataagttctacaccgtgctttcgcgcgagaaacggatccgcgatgcccgcagcgaggacgaggtggaggctgcactggccgacatcgaaaagaccgggctgctgcgcgaagaggatgtcgacaacctgcgcatcgacgtcgccgagcgccgttaccgccggggcgaggcgatcaagctcatgcagctgcgcgaccagatcgagttcgagaaagtccgcacggcgggcgaagggcaggtcgccgtggagcagatgcgccaggggctggagttgcaggagctgacgctcgcgcatcgcaagcgcgaggacgagtattccgacgaacgccgcgcccgggagcgcgagctgcagcgggcagaccgccagtcggagatggaactggacaatgccgagatggatgcccagatcgaacgcctgcgcaaggtcaaggagctcaaccgcgaggacaagaagatggatttggatcacgagcgcgagatggagcgcctgaagcaggaagccctcgacaagaaggcgcggatgacggccgagcagctgatggccgtggctgcgggcgagaacctcgattcgcaggccgcggtgaagttcgccgagtcgttctcggcgggaaagaacgccgaacaggtgcagcaggccgccgatgcccgtatcgccgattcgcagcgccacgaagaccgtatgttggagatgatgcgcgagatgaaggatatggccacgaccatgaccgggcacatcgtccagaataaggatgccgaacgcgaccgttaccgcgaacggatggaacgccaggaagaccgcgtggacaagacgcaggacagtgccctcgaatatgcgacgcgcaacaaccagcaggcggccgcgaagccccaggcgcaggctccccagtccatcgggcgggtatgtcccgactgcggtacggtagccgtgcagggcgtgcgtttctgcgccaactgcgggcgggatctcaaatgagcacggccatggagagataccagggagtaatactgatccggttgcagaatgccgggtcgaaatccgaagggcattatgcctttctggtgcgtgacgacgacatgagcgtcgtgaagctctgccgcgaaggcgcggtgccggtcgacgacccctatttcgtgccgttcgaccggcaggaggtcgtcgttacgggaaccatgagccacgggtggctggtcgcctcggcggtcgagcaggccgttgccggggatgaggctgatagtgaaaccgaagaaaacaacgaacaagcatgaaaacatgtcccaagtgcggttacgataaactcgccgatacagcccgcttctgccacaagtgcggttgcgactgcgctgcggtgcaggtggaacgcacgtcggcggccgaggagccggaagccgcgccgctcgtcggcgataagaacctgatcaatgaaagtacgatcatcggcaagcaggagaaatacgaggcgtcgaatatcacgatccacaacaacatcaccgaggatcattcgcacacgacgatcgtgtgtgcggtttccggaaagcgtatctacttagaccacagtgtcgtgtgcccgaagtgcggcaagcaggtggcgttggaatattatgtcgaggcgtcgaagcgctgcgagaactgcgagcagcaggcgcgcgaggagtaccgtgcgttcgtcgtgcggacgacgggggccgggccgctcgatgcggcgtgtaagcagcagttggatgccgaagcgcagcggttgcagatagacgccgcgacgcaggcttcgatcctcagggcgcggctgcaaaagcccgccgggaaatctgccgagctcacctccgtgcagcgtgccgaactggaagcggccgtgtcgcgcctgatcacggcgacggagcccgaaccggcgcagaaaagcctcgaagccctcaccgtgctgcacgaaaattcgtcgaactacgaggccgactactggtatttcctcgcgcgggcggtcgtctgcccggaggagtcggtgaaggcctatgaagaggagttgaccgacgattactggcagcggtactggggatttctgggctactgcaacaccgggtcgcccaagggcggggctgcggtcgaccgcctgaggtcggtgttcggccagcgcgaggacgacatccggctggccgaggcgatctattaccttgcccggggattcgatgcgttcgagacctcgatgctgggacgtgccggagagcttgcctcgtcggtgcggcgggagtacctttccaagccgttggtgcccgtctacgataccttgcagcggcttgtccgcgaaaatatccggctggaggagaaatacaccccgatggagacttttgtcttcgtggatgttttccgtgccgggaagtatatcgaatacctttgtgccgagcaggcgcgcaaggagcaggaagcccgtgaggccgaggcgaggcgcgaacaggaggcacgcgaggccgaggcgaagctggagcgcgaacgccaggccgccgagcaggccctccgccggaagcaggccgagatgtcggccgaccgctccaaacgcatggagcaggagatggcgcgcctgggcggtgcgaaacccgcggcgacgcaacaggcggattcgaaagcctttgcgggctacgagacggtcgtgccggggacgaagaagcggaactggggaaagacgatcctgatcgtggtggtatgcctgatcgcactgatcgggctgctgttcctgattccggctcccgaatcgctgcaatagaggctgggctgcggctgagggcccgtcgggggtttctgttcccgggcgatggactcgggttgcggacttcgggggcgggccgttgcggccgacgaaaataaaccgggcagggtttttccctgcccggttcgttatattctattccgcggatgctgtccggtggagcggcggacgcatcttcgggttcagattttgtccagttccacggtgaaatgccgcaggatcggggcttcgaaggtgatgcggtagccggtggtgatctctgcgcggcgctcgtagatgttgcggcaggccgcggcgatcacgcggatgtggttgtccgagtagacccgccgcgggatcgccaggcgcagcagttccagccgcgggtagcggttctcgtgcgtatcggggtcgcggtcggcgaggatcgagccgatctccacgccgcggatacccgcctccaaatagagctccacggcgagcgtctgggcgataaactgttccttcggcaggttggggagcacttttttcgcatcgacgaagatggcgtgtccgccggccggccgctggtagggtacgccgtattcgtcgagcaggtcgcccagcagcttcacctggcggatgcgggcgtcgagttgttcgtattcggtattttcgtccagtcccacggccagcgcatccatgtcgcggcccgacatgccgccgtaggtcacgtagccctcgaacatgatgctgaaggtcatggcctgcctgtagagctcttcgctgcgcatggccacgaacccgcccatgttcaccacaccgtccttcttggccgagatggtcatgatgtcggcataggtgtagatttcgcggacgatctccttgatggtcttgtcggcatagccctcctcgcgggtcttgatgaaataggcgttctcggcgaagcgggccgagtcgagcagcaggggtacgccatagcggcggcagacttcggccgtttcgcggatgttgcgcatcgacacgggctggccgccggccgtgttgttggtgatggtcagcacgacgcacgggactttctcgcgcgggttctcgcgcaggagcttttcgagcttggcgatgtccatctcacccttgaacggcaactctttctgggtgtcggccgcatcgtcgatcgtgcagtccacggcgtggcagcggcggaattcgatgtgccctttggtggtgtcgaagtgggagttgcccgggacgatgtcgcccgccttgagcagtgctgaaaagatcacgttctccgcagcacgcccctggtgcgtgggcaggaaatagggcatcccgaagatgctttcgatcgtctccttgagccggaaataggacgaggctccggcatagctttcgtcgccggtcatcatggccgcccactggcggtcgctcatcgagcctgtgcccgagtcggtcagcaggtcgatcgtgacctggtcgctgcgcagcttgaaaaggttgtagcgggcttcgcggatccatgcttcgcgctccgcacgggtggaggtgcggatggcctcggtcatcttgatcttgtaaggttctgcatacggaagtgtcatagaaaagagcgttttaggttataaattgttgttcttttcctcaaaattataaaaatattttgagatatttgacatcggtattatatttgtgtagaccggtgtggattttcttaaacttttttaccgcatggaaaagtatcgttgcaccgtctgtgaatacatttacgacccggagtcgggcgacccggagaacggcatcgaccccggtacggctttcgaagacctgcccgacgattgggtatgcccggtctgcggggaaggcaaatgggcattcgaaccgctcgaagcaaactaaaacgggatggctatgattaagttcaacctcattgtttcacttttaattttacctattatggcaacagacattgcagcacaggcacggtttacccccaaggagctgccttacgcttacgacgctctcgcaccgcaggtctccgaagagacgctgcgtttccaccacgacaagcattacgtggggtatgtgaataaactcaacgagctgattctcgatacgccttacgcccggcagccgctggaggacatcgtcgtttcggccgacggcgcgattttcaacaacgctgcgcagatgtggaatcacgagttcttcttcgaccagctttcgcctgatggcgaggcgcgtccgacaggggcgttgctgaaggctatcgacgcggatttcggttcgttcgagcagttcaaggcccagatggagaaggctgccgtcggtcttttcggttcgggatgggcatggctcgccgaggataaatcgggcaagctggccatcgtcacggagcagaacgccggcaacccgatgtgtcacggcatgaagccgctgatgtgcttcgacgtatgggagcacgcctactacatcgactaccgcaaccgtcgtgccgacgccgtcgccgccctctgggatcgtatcgactggaaggtcgtcggagatcgttacgaaaagaaataagggtttgtttctgttggaaatgccgcctccggttttcggggcggcattttcttttgtgctgcaggccatccctccgcgcccggcctttcgcagtcgcccgggggagggcggaatataccgggcggggctcgttgccatccgccgggcttgtttccggagtattacctgaatccggctatgggtgtttttgtactcaaaattcatcattatgtacgttttttcgtccatggattccgttttctgcgcgaaagagtgtatcttcgcagcacgaaaatagtaaggtcgaaatgctggagaggattcaatatgctttgttcatcttgctttttgtcttggcaggaagcctggatggcgctcaggttcagtccggtagggtagtttcgcagcccgaccggatttgccagtccactctccggacgccggttccggcacacaattgtttcacggcggcagtcttcacctgcgacgctccgatcgaaaatcccgtccaaccgtccgcccagaaggcgatcgtccgtctgcgccatgatgcccgggccatggcgtcggcccgcgggctgtcctgccgtccggcttattcggactgcttcgacctgcatcccaagccggtcgattattatgtcttttcgctggggcgtatcctgatttagccgctgttcccgttcccgttttgccgcatgttcccggatgaggattttttctcccggagatgcgttcgtgttttcgtgttccgagtaaattcgtaaaaacgataggttatgtattttacgctattggtggtcgtcatcctgacggctattgcgctggtcgcagtcgcgctgggtatcgcccgcgccatatcgccgcgctcgtacaacccgcagaaaggcgaggcgtacgagtgcggtatcccgacgcgcggacggtcgtggatgcagttcaaggtggggtactacctgttcgcgatcctgttcctgatgttcgacgtggagaccgtctttctcttttcgtgggcggtggtcgtccaggatctggggatttacgggctggtgagcatcctcttctttttggtcgtactggttttgggccttgcatacgcatggcggaaaggagctttggaatggaaataaggaagccggagataaaggcaatgaaatacgaggatttcaatgacaacgaatacctcgaaaagatggcggccgagctgcgccgcgagggtacgaacgtgatcgtagggtgcctcgacgaattgatcgagtgggggcgcagcaacagcctctggccgctgactttcgccacgagctgctgcgggatcgagttcatggccgtgggggcggcccgctacgactttgcccggttcgggttcgaagtggcccgcgcctccccgcgccaggccgatttcatcatggtggccgggacgatcacccacaagatggcccctgtcctgaagcgcctctacgaccagatggccgacccgaagtatgtgatcgccgtggggggatgcgccatcagcggcggcccgttcaagaagtcgtaccatgtgctgaacggcgtggacaagatactgccggtcgatgtctatatccccgggtgcccgccgcgccccgaggcgatgctctacgggctgatgcagttgcagcgcaaagtgaaattacagcggtttttcggcggggtgaacaagcagatcggtaagcaggagtacgaagagctgcttcgccgggatctgacggccgaaaagaacgatttgaacgtggaaggaggagaaaaacaatgaatatcagagagaaaataacggcttgggaacccggcgccgtgtggtcggaggccggggacgggatgttcaccgtcccggtggagaaattccacgccctggctgcacgcctgagggccgagggattcgatttcctgcgcagcctgacgggcatggactggggcgaagaggggttcggggcggtctaccacctcgaagccaccgcgacgggcgagaacgtcgtgttgcggacgctgacccccagccgcgagaagtgcgggctgccttcggtctgcgacctgtggaaggctgcggaactcaacgagcgcgaagtcttcgactatttcggcatcggtttcctgaaccatcccgacatgcggcgcctgttcctgcgcgacgactgggtggggtaccccctgcgtaaggattacgacccggggctcaacccgttgcgcatgaccaacgaagtgtcgaaggacagcgccccgagcttcgaactgacggcggacggcagcttcatccgccaccgcaacgtcttgttcgaggaggacgaatatgtcatcaacatcggcccgcagcaccccgccacgcacggcgtgctgcgtttccgcgtgtcgctcgaaggcgagatcatccgcaagctcgacgtgcattgcggttacatccaccgcggcatcgagaagatgtgcgaaagcctgacctacccccagacgctggcgcttaccgaccgcctcgactatctcggggcgtcgcagaaccgccatgcgctctgcatgtgtatcgagaaggggttgggtgtggaggtgtccgagcgcgtgcagtacatccgcacgatcatggacgagttgcagcgtatcgactcgcacctgctgttctttgcctgcctctgcatggatatgggggccctgacggcctttttctatgggttccgcgaccgtgagaaggtgctcgacatcctggagcagaccaccggcgggcgcctgatccagacttacaatacgatcggcggcgtgcaggctgacatccatcccgatttcgtacggcgcgtgaaggagtttatcgcctacatgcgcccgacgctgcgcgagtaccacgaggtgttcacggggaacgtcatcgcccgggaacgcctgaaaggcaccggcgtgctgacccgcgaagacgccatctcgttcggtgccacgggcggtacggggcgtgcctcgggctgggcgtgcgacgtgcgcaagcgccatccctacgccatgtacggcaaggtggatttcgaggaagtgctctacgacgagggcgactgtttcgcccgttacatggtgcgtatgcgcgagatcgaacagagcatggacatcatcgaacagttgatagacaacattccggaaggcgaataccagttgaagatgaagcccgtgatccgcatacccgaaggcagctactacgccgccgtcgagggcagccgcggggagttcggggtcttcatcgagagccgcggggagaagtcgccctaccgcatgaagttccgctcgacgggactcccgctcgtgtcgtgcctcgaaaccattgcgcgggggacgaagatcgccgacctgatcgccatcggcggtacgctggattacgtcgtgcccgatatagacaggtaaccggatgtcgcttccgggtttataagcctctccccttggggtgggagcgggataaaaaaggaaaaacttacagatatgtttgattttagtatagtaacgagctggattcacgggctgctcacgtcgctgatgcccgtggggctggcggtcttcctggagtgcgtgatcgtcggtgtctgcctgctgctgatgtacgcggtgatcgccatcctgatgatcttcatggagcgtaaggtctgcgcggcgttccagtgccgcctggggcccgtgcgcgtggggccgtggggtacgttgcaggtgatctgcgacgtgttcaagatgctcaccaaggagatcatcaccatccgccgctcggacaggttcctctacaacctcgcgccctacatcgtcatcctggcgtcggtgctggctttcgcctgcctgccggtgaacaaggggctcgaagtgctggacttcaacgtgggcgtcttcttcctgatggcggcctcgtcgatcggcgtggtcggcatcctgctggcggggtggagctccaacaacaagtattcgctcatcggcgccatgcgaagcggtgcgcagatgatctcgtacgagctgtcgatcgggctgtcgatcctgacgatcgtcgtgctgaccgatacgatgcagttctcggagatcgtcgcccgccaggccgacggctggttcatcttcaaggggcatgtcccggcgctggtcgccttcgtgatctacctgatcgcgggcaacgccgaggtcaaccgcgggccgttcgacctcccggaggccgaatcggagctgacggcagggtaccacaccgagtattcgggcatgcacttcggcctgttctacgtcgccgagttcgtcaacctgttcgtcgtctcgggcgttgcggccaccatcttcctcgggggatggatgccgctgcacatccccggctgggagggcttcaatgccgccatggactacatccccggcttcgtctggttcttcggcaaggcgttcttcgtggtgtggctgctgatgtggatcaagtggaccttcccgcgcctgcgtatcgaccagatactgacgctggaatggaaatacctggtgccgatcgggctggcaaacctgctgctgatggtcatcgtcgtcgtatttaaactgcatttttagtcatgagtagctatatcaaaggacttttccacgggttgggaaccttgctgacgggtatgaaggtgaccgggcgggagttcttcaccaagaaggtcaccgagcaataccccgagaaccgggccacgctcaagatgttcgaccgtttctgcggcgagctgaccatgccccacgatgccggggggaagaacaagtgcatcgcctgcggcctctgccagtcggcatgtcccaacgaaaccatccgtatcaccaccgagatggtcaccgatcccgagacgggcaagtcgaaacgccgcctggtgctttaccagtacgacctggggtcgtgcatgttctgccatctgtgcgtcaacgcctgcccgacgggggccatccgtttctcgaccgatttcgaacacgcggtatacacgcgcgggaagctggtcaaaaccctgaacaaacaataagccatggagataacactcgaattaatcgtctttacggtgttggcggtctttacggccgtgagtgccgtgctggccgtgacgaccaagcgtatcctgcgcgcggcgacctacctgttgttcgtgctgttcggtacggcgggcatctatttccagctgaactattcgttcctgggcgccgtgcagctgctgatctatgccggcggcatcacggtgctgtacgtattctcgattctgctgacctcgagccagggcgacaagtcggaggacataaagggctacaagctgttcgtggggctggcggcgacgctgctgagcctcggggtatgcctctacgtgacgctccggcacgatttcatgccgtcgcatttcgtccacggcgaactggacgtgcagacgatcggccacgcgctgatgagcagcggcaaatatggctacgtgctgccgttcgaggtcatcagcatcctgttgctggcctgcatcgtcggcggaatcctcatcgcacgcaaacgctaaaaagagtacgactatgatacacatggaatattacctcgtcctctccacgatcatgatgttcgtgggaatctacgggttcgtgacgcgccgcaacctgctcgcgatgctgatctccgtcgagctgatcctcaattcggtcgacatcaatttcgtcgtattcaaccgcttcctgttccccgaacagctggagggattcttcttcacgctattcgccatcggcatcagcgccgccgaaacggccgtcgcaatcgccatcatcatcaacatctaccggaatctgcgcaacatcggggtgaagagcctgcgggagatgaagtggtaacgattctgaaaaaacgattgttatggaatatacgatccttatcctgctgctgccgctgctgagcttcctcttcctggggctggccggcatgaagctcaagcccgtcgtcgcgggcgccataggcacggcggtgctggccgtagtggcgttgctgagctattgtacggcgttcgagtatttttccgcagggcgcgacgcctcgggggtgttccccacgctcgtgccgtggaacacggtatggctgccgatcagccggacgctgcatatcgacctgggcatcctgctcgacccgatttcggtgatgatgctcgtggtgatctcgaccgtctcgctgatggtacacgtctactcgctgggctacatgaagggcgagcggggggttcagcgttactatgctttcctgtcgttgttcacgatgagcatgatggggctggtggtggctaccaacatcttccagatgtacctcttctgggaattggtgggcgtaagctcctacctgctcatcggtttctattacacgaagaaggaggccgtcgcggcctcgaagaaggcgtttatcgtgacgcgcttcgccgacctggggttcctcgtcggcatcctcttctacgggtactatgccgggacgttctccttcacgcccgacgtgcagctgctggctgccgccggtgcgatgatcccgctggcgctggggctgatgttcatcggcggcgcgggcaagagcgcgatgttcccgctgcatatctggctgcccgacgccatggagggcccgacgcccgtgtcggcgctgattcatgccgcgacgatggtcgtggcgggcgtctacctcgtggcgcgcatgttcccgctctttgtcggctatgcgcccgaggtgctgcactggacggcctatatcggggcctttacggcgctgtacgccgccgtcgtggcctgcgtgcagagcgacatcaagcgtgtgctggcgttcagtaccatttcgcagatcggcttcatgatcgtggcgctgggcgtctgcacctcggctgatccccatacgggcgggctggggtacatggcctcgatgttccacctcttcacgcacgccatgttcaaggcgctgctgttcctcggcgccgggtgcatcatccatgccgtgcactccaacgaaatgtcggccatgggcggcctgcgccgatacatgcccgtgacgcatgcgacgttcctcgtggcctgcctggccatcgcgggcatctggcccctgagcggtttcttctcgaaggacgagatcctgacggcgtgcttcgccttcagccccgtgatggggtgggtgatgaccgggatcgccggcctgacggcgttctacatgttccgcctctactataacatcttctggggacgcgagaaccgggaactgcatgcggcgcacaggccgcacgaggcgccgctgacgatgaccctgccgctggtgttcctggccgcagtgacctgcgtggcggggttcattccgttcgggaagctggtcagcagcgacgggatgccctacacgatccatatcgaccgcagcgtggcgggcgtgagcctctgtgtggctgccgttgccatcgcgttggcgacgtggatgtacctgcgcgagcgccagacggtggccaatgccctggcagcgcgcttcagagggctgcataaggcggcctaccaccgtttctacatcgacgaggtttaccagttcgttacccaccgggtgatcttcgcctgcatctcagccccggtcgcatggttcgaccgccatgtggtggacggcctgatgaacatgctggcgcgggcgaccaacggcgcggcatacgtgatccgcgacatgcagagcggcagcgtgcagcgttactgcatctggttcctcggcggtgcgctgggacttacgatcttcttgcttttaatctgctaaactgtagctgttatgaatatgttatcactgtttcccgccatcccggtgctgatgatgctggggctctggctctcgaagtccgcgcggcaggtgcgtgccgtgatggtggcgggttcctcgctgctgctggcgctggcggtggtgctggtgttccgctacctcggcctgcgcgaggcgggcgagcaggccgccatgctctttaccgaaagccatgtgtggtatgcgccgctcaatatccactatgccgtgggggtagacggcatttcggttgccatgctgctgctgtcggccatcatcgtgtttacggggacgtttgcctcgtggcggatgaaggagcaggtcaaggagtatttcctctggttctgcctgctgagcgtgggcgtcttcgggttcttcgtttcggtcgacctcttcacgatgttcatgttctacgaggtggcgctgattccgatgtatctcttgatcggcgtgtggggcagcggtcgcaaggagtatgccgccatgaaactgacactgatgctcatgggcggttcggcgctgctgctgatcggcatcctgggcatctacttcggtgccggggccacgacgatgaatatcctggagatcgcgcagctgcataacattcccctggcgcagcaatatatctggttcccgctggtcttcgtcgggttcggcgtgctgggcgccctgttccccttccatacgtggagccccgacggccatgcttcggccccgacggccgtgtcgatgctccatgccggcgtgctgatgaagctgggcggctacggctgtttccgcgtggcgatgtacctcatgcccgaagcggcgcacgaactgagctggatattcatcatactgacgacgatctcggttgtgtacggcgccttcgcggcctgcgtgcagaccgacctcaaatacatcaacgcctactcgtcagtgtcgcactgcggactggtgctgttcgccatcctgatgatgaataccacggcgggtacgggcgctgtcctgcagatgctgagccacggcctgatgacggcgctcttcttcgcgctgatcggcatgatctacggccgcacgcatacgcgcgacgtgcgcgaactgagcgggctgatgaaggtgatgcccttcctggcggtgggctacgtcatcgcgggcctggcgaacctgggcctgcccggcctgagcgggttcgtcgccgagatgacgatcttcaacggcgcgttcatggacaacgacacgttccaccgtgtggtgacgatcatcgcctgcacgtcgatcgtcatcacggcggtctacatcctgcgggtggtcgggaagatactctacggcacctgtaccaacgaagcgcatctccggctctccgacgccacgtgggacgaacgcctgtcggtcgtctgcctcgtcgtcgccatcgccggcatggggctcgcgccgctgtgggtgagcgacatgatccggggcagcgtttcggagatcattacacacttaatgaattaagcgactatggattacagcaatatattctcgtacatgcaggccgaagtgacgctcatcgcggtgatcgtcctgctgttcctctatgacctgatcgccggggagcgcggaaggcgctggttttcggcggtggcctgcgggctgctcgcggtgcaggtgctggccaatgtcgttccggggacggcgggcgaggtattcggcggcatgttctgctatgtgccgatgcacaccgtcgtcaagagcgtgctggccatcggggcgctcatcgtctgcctgcaggccggtacgtggctgcggcgcgacgacacggcccacaaacagggcgaattctacatcctgctgctttcgacgctgctgggcatgtatttcatggtcggggcgggcaatttcctgctcttcttcctgggcatggaactggcttcggtgccgatggcctgcctggtggcgttcgacaagtacaagcaccattcggccgaagcgggtgcgaaatacatcctctgcgccttgttcgcgagcggtctgatgctctacggcatctcgttcttctacgggactacggggacgctctacttcggcgatatggcggcgcgcattacggggtcgccgttgcaggtcatggcgatggtcttcttcttcgccgggctggggttcaagatttcgctcgtgccgttccatctctggacggccgatacctaccagggtgcgccgacggccgtgacttcctacctctcggtcgtgtcgaaggcctcggcggcgttcgtgctgatgactgtgctgatgaaggtcttcggcccgatggtcgggcagtggcagacattgctctatgccgtgacggtgctttcgatcacggtcgccaacctttttgccatccggcagaccgacctgaagcgtttcatggccttctcgtccatctcgcaggccggctatatcatgctggccgtgatcggcggcagcgccatcgggatgacttcgctcgtgttctacgtgctggtatacatggcggccaacctcgccgttttcggcatcatttcgaccatcgaacagcatagcggcggcaaggtcgggctggccgattacaacgggctttaccgtaccaaccccaaattggccttgatgatgaccctggcgctcttctcgctggcaggcatcccgccttttgccgggttcttctcgaagttcttcgtcttcgcagcagcattcaagggtggtttccacctgctggtgttcatcgcgcttgtcaatacggtggtttcgctctattactacctgctggtcgtgaaggcgatgtatattacgcccaacgaagagccgatcgcaccgctgcgcagcgaccgctatacgcgcctcagccttgcgctctgcatggcggggattttgctgctgggtgtcttcagcgtggtttacgacagtatcaacgtattctcgttcgggctttagacggacgacgggtaaggagggggggcacttgctttagcaagtgcccccctcctcctcctcctttattcgtgcggtattccgcggcgcttttgggaatgtgcgttccgaaatcgggaagttggccggccatcttcccgtttgcagggcggcggtttttcagcctttgttttcccgttcgaggccgagcaggtaggccttggcctccagcccgcccgcatagccgaccaaagtgccgccgctgccgactacgcggtggcagggaacgacgatggcgatcgggttgcggtggttggccatgcccacggcgcggcaggccgtcggacggccgatctgtgcggcgatctgcttgtagctgcggctctcgccgtaggggatcgtccgcagggcatcccatacggcccgctggaacggggtgccttcgggcgccagcgggagggtgaaggcacggcgtctgcccgcgaaatattcggtcagctccgccgcagcctgccggagcaggggtgtgaatgcctcgggcgtgccttcgggtgtttgttcttccgccgggccgcatgcgtgcgcaaagaaaatgcgtgccacggcgtcgtccgaagctgcgatgccgactctgccgacgggtgtcccgatataaacgatccgttccatgacagggcggttcagaggtgttcgagcgtgtattcgatcatcttctgccggacattggccgtgtcgtcgggctgcatcgaatggttctggtcggggtagaccatcatgtcgtactgcttgccgcagcggttcagggcacgtgccatctccacgctgttctggaagtggacattgtcgtcggccgtgccgtggatgatgagcaggcgggtcttggtgtcgtcgagcatccgggcgaagttgatcggggagttgtcgtcgtagcctgcggcgttgtactgcggcaggttgttgtagatttcggtgtagatcgagtcgtagtagcgccacgaagtgacgggggccacggcgatcgccatgcggaatagcccgtggcctttcatcgcgcagcccaatgccatgaacccgccgtacgaccagccgtagatgccgatgcgtgcagggtcgacgtatggctgtgaagccatgtagcgggcgaacgagagctggtcttcgacctcctgcgccccgaggcgcccgtaggtcgatttcttgaacttctcgccccggaatcctgtgccccggccgtcggcgcagactacgatgtagcctttgtccgtgagcgcatcctcccagtcgagcgaccagcggtcgcttaccgcctgcgagccgggccccgaatactgggtcagcagcacggggtaacgctgcgatgcatcgaagccgcggggcttgacgatgtaggcgttgagcgtgtcgccgcgctcggtcgtgaaggtgaagaactcccggacggggcgctgtacggccgccagctcttcgcggagtttgcggctgtcggccagcgtgcggatggggttgccttcgttgtcgcagacttcgacccggttgggggtcgtggcgttggagaaggtcgagatgtagtatttcatcccggcactcggggcgatggcgtagtagccctcgccggtcgtcagacggcgcttgtccttgccgtcgagccgtacgctgtacaggttgcggcgcagcggagaggtttcggtcgagaggtaccagacccgtttgccgtcggtgccgaccacgtcggtcacctcccagtcgcctttggttacctgggcgagcaaccccttgcggatgctgtaaaggtagaggtgcatgtagcccgtgtgtccctcctgccgcacgaggaagcggtcgccgtcgatgaaggtgacggtcttgtcattcacgcgctcgacgtattgctgcgagcgttcgtcgtagatcgtgcgctgggcaccgttgggctcgcagaggatcacctcgaaggtgttctgcctgcggttgaggcggaagtagtagagccggccgtcgggtgtccagccgatgcggggaatgtactggtcggcctcgccgcccgtgtcgatgcgctcccgggcccctgtcgcaaggtcgcatacccacacttcgaccgtggagttgcgctccccggccttggggtatttgaacgaataggcctggttgtagagtttgccgtcgaagcgcatcatctccatcaggggcacttccgattcgtcgaagcgcaggtaggcgatgcggcggctgtcgggcgagaaggcataggccttcgtgaagccgaactcctcctcgtagacccagtccgtggtgccgttgatgaccgagttccacgccccgtcgtcggtgatgcggcgcgtgcgcctggctgccgtgtcgtagacatagaggtcgttgcggtcggaataggcgatcagcttgccgtcgggcgagaacgaggcgtcgcgcggggcttcggcctcgcggagtacgggcatcaggctgttgcccgaggccaggaaatagtcggtcgtgtaggagtggcggtaaatcggcctggcgcccgaggcgatgagtatctgccgttcgtcgggcgagaaggcgtaatccgtgacgacgaggttggccgtcggcttggggagcatgttctcgccctgtcctgccgtggcgtagccgtaacggacgatgttgttgccttcgaggatggtatagtgttcgccgtcggccatcgaacggatgccgcggacggtttcgttcatcgagcgcaggcgtgcgatctcggcatattcgccccgcgcctgtaccgtacctgtgccgaccgctgcggctgcgaggagtgtgaaaagttgtgccttcacgtggaaatcgggtttaaatgtcctctacttcgaaatcatagccgaggcgtttgcccgtgacgaatttcgagttgtccatcttggtgttgaactggtcgaccgtcacgcgcttgttgtcctcgtagggcggcatcagcaggtcgaagttcagggcgaaccagatcgccggctcgaggatggcgatcagggcttcgcggtcgatctcggccttgccgaagttcatcgcccgcatcgaggtctgctgtttgccctcgacgaaatagcggcgctcgcggttgatgaagatacgcccgatgaggtatccctcgtcggcgttgcggttgaacttgaacgagtcggagaggaaattgtagatgttgatcaggccgcagtaggaattctcgcggtcggactgtacgtaggggttctgccagatcaggtggttggcgtcgaattcgaagacgtcggtgtgcatctggaaaatgaggatgtcgttggccacctgcagctgcgcctcgaattttccgcggtcgcggtattcgagcctgacgcggcggtcgagtttgccgtcgagttcgtcgtccatctccgatgccatttcgagcagcgtctccttcagttcgttgaaggctgcgaaggtgttgtcgaagacccgttgtttgagggtcgacttgcggatgatcgtatccaggatcttgcttctgagcggtgtcgtttccatgctatgctgtttttattttatgcgtatctgttgccccttttcgagtgtgctgccgggcttgaggcggttgagcttctcgatcgaacgggtgcggatggcgtaggactggcctacggcataggccgtttcgccctggcggcagatgtgggtgtgggcattgccctcccagcgcttcttcttgcgctcgatgtagaccacctcgtcggtcatcggctgtgccttcttgtccttcaggtcgttgaacttacgcaggttgcgtgccgaaatgcggaacttctgcccgatattctcgaacgtgtcgccctccttggccagcacgtagtgtacgccgttggtctggtagacattgtagccgttgtgggcgttgatcgtcacccggtagttgtccgggtcgatggccgacgaagatccggaaaccggttcgacgctgctctggtcggcgaaccacccttcgggatcggttaccttgcgtcccatgcgcgaggcgtagagccgctcgccgtcgggccggtcgagcaggtagagctggttctcctcgatgatgcgcgtgagccgctgcgcgtagtcgggcgccgtggcgtagccggcggctttgagcccccgtgcccagctcttgtaatcgtcggacgagtaggcgaacagcgagtcgtagcgtggctgcgaatcgaggaattcggcatggtccctgtacgacgcctcgaccgaggggtagctgcggaagcactcccccttggcgtcgtcgtcgtaatagaccttgtcgcccgtccagttgcgtttgcacttgatgccgaaatggttgttcgattgcagcgatagccagctgttgccgcagtcggactcgaggatgccctgcgccatggtgatgctggcggggatgccgtaccgctccatgtgggccacggcgatggatttgtaacggtcgatatattcctcgcgggtctgccgcacctgtgccgggaggctttgcagggctatcagtaggattcctgcgagcgatattgcttttttggaaaaattcattatctttgtttaatctttatggacaaaggtatgattttcctgtgagaattacaatataaaatgcactgctgagctatgtttaccgaaaccgcaaacgagatcttcaaccgtgccatcggagattaccaccgctgggacgatgtggatcacccgatcgaaaatccctatgagccgggctcgctcgaacacctgttataccataagaactggatcgacaccgtgcagtggcatctggaggatattatccgcgacccgcagatcgaccctgtggccgcgctggccatcaaacgccgcatcgacaagtcgaaccaggatcgtaccgacatggtggaatatatcgactcgtacctgctcgacaaatacagggacgtggaaccccggcccgatgccaggctcaataccgagaccccggcgtgggctatcgaccgtctgtcgatcctggcgctgaagatttaccacatggcacgggaggccgaacgtacggacgtcggcgatgcccatcgcgcggcgtgccgcaagaaactcgacgtgttgctggcgcagcaggtcgacctctcgggggcgatcgaagagctgatcggggacatcgaggccggccgcaagtatatgaagacctataagcagatgaagatgtataacgacccggcgttgaacccggtgctttatgggcagaaaaaataagagacttccgcgtcatctggtcgttttccggacttcggcgatgggggatgtggtgatgctggcgcatgcgctgcgggccttgaaggaggcctatcccgacctgagggtgacggtagcgacaagacccgtgtttcgagccttttttacagggctcgatctcggttttatggatgtagatatcaagggtgtgcaccactccctgcggggaatgtggcgcctggccgccgatgcgcggcgcctgggggtggatgccgtggccgacgtgcacggcgtgctgcgctcggtgatgttccgcaccgccctgtggctgcgcggagtccccgtggcggccatcgagaagggacgcgaggagaaaaaggagtttatccgcaagggcggccgcgacgtgaagcccgccaagcataccgtcgtccgttattgcgacgtgttccggaaactgggatttgtgttcgacgaccccgtgccggccctgcggcgctgccgtcccaacccgatgggggagaagacgggcacctggatcggcttctcgccgttttcggcgcagcaggggaaaacctatcccacggcgctcgggcgggaggcggtgcgtctgttggccgaacgctatgaccgggtgttcatacacagcggaggcggagccgaagcggagttcgcgcgggaaatggagcgtgcgcaccccaatgtgacggcgctgttcggacgggtcgggatggacggcgaattagacctgatcgccaacctggactgcgtggtggcgatggactcgctcgtcatgcacatggcctcgctcgtggcgacgcccgtagtgtcggtatggggcgctacccatcccgggctggggttcttcggctatggctgcgatccgcgcggcatcctgcaggccgatatggaatgccgtccctgttcggtcttcgggaacaagccgtgccgttacggggattaccgctgcctgtatgccgtgacgcccgccatgattgcggagcgggtggccgaaatggtcggtgaataggttcgccgtggatatgcaaacagccctccggatcaggagggctgtttttttgtgactactctgtgccgggcaccttttcaggactgcccctttatttccgcggacgggcgacgatgccgttcggcacggcgcgttcgccggcatggtcgaagcggcggttgtcgctggggtggctgaccaccccttcctgtgccgtccagagtgccgaagaaccgccgccgtcgaggttgagggcgtccgtgagccccagcaggcgagcgatgtaagccgtttcggcgatcgtagcaccggcggcctgtcctttggcgcggccgtcgatcacggccatcaccacctcgccgttcgggcgcttgccgatcagcgaacgcgggtgtcggtggatatagaagctgtcgccggaatcgtattcgatggccttgcctccgctgaccagtagggggccggctgcgagcgccgcgcggtagcggcgggctatgcgggggtattgggtggtgtcgcaggcgaaaatggcgacgtcgtgaccctgtttgtcccggatggcgatgatgccgttggtacgcatgagttcgccgggcgtcgtgcggcccaatacccggcagtcgaccatcacgaaggtgatgggcgtaaaggttttcatgttgaaatagctgccgttgatggctgctgtggcgtcggcggcttcgcccatgcggcctgtggtttcacccttgccgtcgagctgtacgatctgcgtggcgaagtgccgtgcggggtagctgacgaccgagatgctctgccgcgaaccgaacatctcgacctgggcgtggcggcactcggcaccccggccgaggtcggtggtatgccagtcggcggtgacgaaggcgatggagtcgccgggcgtctgtgccgcggcggggagggtgaacaggagcagcagggctgcgaggagtattctggccatagttgcagtgtggttgacggatgcaaatttaacgaataaaccggttcggcaagccgtttcacggaactgtttgcggggcggggcgcgttttgtgccgggcgatcgtcccggtagcccgggctgcccgtcctgcaaggcttgtagtgtccgccaaaggtctgtggttacctccgtcgaaaacttgtggtgcccgtccggttgaaaacggtggcgtcctccggcaaataaaacgcgccctccgggattgcggaaggcgcgtgtgaccgcagggggctgcggctattcgttggctttggtgtagacggcgccgttgccctcgatcgtcagcgtatagataccgtcggcgtccttggcgatggtggccgtttcggtgaattcgatcggggagcccgacccttcgctcacgcccttgagcaggattttgccggcttcgccctgcaattcccacgacgcgtagcgcagcgtggccatgttgatcgactgcgcctctccttcgaccatgatccggatacccatgacgccatcggggtcgatcgggtcgggcatcgtccaattgccgacagcctcggcataggtggggtcggtggccactttcgaggcggccgcgccctcttcgagtttgccgctgtaattgaccgtgacgggcgctcccagcagcaggccgttggcctcgctcttgtcggcgtccatggtcgagaaggtgaatgtcccctcggcgttttcgacggttacggtgttcatcgacgcatcggtgatggtgccggtgaagctcttgggggtgttgtcgctgcaggctgccaggccgcacagggcgatggccgcgaccatgattttcatgcgtttcatcgttcgtatggtattttaaaggtttaacgtttccggatatattcgtcgatggcctttgccgccatgcggccggcacccattgccaggattaccgtggcggctcccgtcacggcgtcgccgcccgcgaaaaccccttcgcgtgatgtggcgccgtgttcgtcggcggtgatgcagccgcgccggttggtttcgagccctgcggtcgtggcggccagcagcggattgggcgaggtgcccagtgccatgatgactacgtcgcaggcaatcccgaactccgagccggcctttacgacgggcgaacggcggccgctttcgtcgggttcgcccagctccatctccacgcaccggatgccggtcacccagccacgctcgtcgccgagcacctcggtggggttggtgagcatcctgaagcagatgccctcctccttggcatggtgcacctcttcggcgcgtgccgggagttccttctcgctgcggcggtatacgatcgtcgcctcggcgcccagccgcttggccgtgcgtacggcatccatcgccacgttgcctccgccgaccaccaccacccgtttgccgacatagatcggggtgtcgtagtcccggtcgtaagcgtgcatcaggttggcgcgtgtgaggaattcgttggccgaaaccacgccgttgaggttctcgcccgggatgcccatgaagcggggcagtccggcacccgagccgatgaacacggcggcgtagccctcttcgtccagcagcgagtcgatggtcacggtgcggccgacgatgacgtcggtctcgatctctacgcccagtttttcgacctcggcgatttcgcgtgccacgatacgctccttgggcagccggaactcggggatgccgtagaccagtacgccgcccgccttgtgcagcgcctcgaagatcttgacttcatagcccagtttcgcaaggtcgctcgcgcaggccagcccggccgggccgctgccgatgacggcgaccttgtacccgttgcggggtgcggtctgtgccgcggcggcgccgtgttcgagcttccagtcgccgatgaagcgttcgagtttgccgatggcgaccggttcgcctttgatgcccaggatgcaggagccttcgcactgcgattcctgcgggcagacgcggccgcagatcgagggcagcgaactgtcgccggcgatgatgtcggcggcctgctgcaactccccggtgtgcaaggctccgatgaagtcggggatgcggatgctgacggggcaggcagccacacagcggggattcctgcagtgcaggcagcgcgacgcttccagccttgcctcgtcgaggtcgtaaccatagcagacctcctcgaagttggtcgcgcggatttgcgggtcttgttcgcgcacggggacgcgcggtatcttgtttgccattgtcgtgtatgctttggggattcccggggtgtgcgtcccgggcggtgtctatttatccagtcctattttacattggtgcccggcggcgcgttcggcctcgatggccgcggcgcgctgttcctgcgtgcggtacatgccctgccggcgcatggcttcgtcgaaatcgacctcgtggccgtcgaactcggggccttcgacgcaggtgaaacgcgtcctgccgccgaccgtcacgcggcaggcgccgcacatgcccgtgccgtcgaccatcagcgcgttgagcgacacggttgtcctgagcccgtatttttttgtggtgagcgccacgaatttcatcatgaccatgggcccgatggcgacacattcgtcgtaatgccggccctgtttttcgaccagctcctcgacgacctgcgtgacgagccccttgaacccttccgaaccgtcgtcggtggcgatgtagaggttttcggctacggcacgcatggcgttggtatagatgagcatgtcgcgggtcttggcgccgatgatgacatcggccgcgacgccgtgctcgcggagccatttgacctgggggtagaccggggcggtgcccacgccgcccgctacgaagaggtagcgccgcctgcggagctcgccgggctgcatcgttacgaattccgaggggtgtcccagcgggcctgcgaaatcggcgaaggcatcgcccgcatccagcgagcatattttgcgtgtcgaggcgccgatagcctgcgtcacgatggtgacgctgccctgcgcggggtcgtagtccgagatcgtgagcgggatgcgttcgccgtgctcgtcggcgcggacgatgacgaactgcccgggttgcgccgaatgtgcgacgcgcggtgcgaggacttgcatcagccagatgccctcggcgaggagtcttttttcaagtatcgggtacatcaatatattttttccggccgctgccatcgggcgggagccgcattttgtcgttattcttcgatgatggccgtcaccctcagccgccgcatcgggcgcagcgggtcgttggtgacgatcatcacgaaatcggtcagcacgccgaaatcctgttcgcccgggtcgacggacaccctcgccgtgaaggaactgcccgccgggatgcgttgtccggggacgagcgtcgtggcgatcctgccgttggtttcgacggcgcgcacgaccagttcggcactgcccgtattcgagagcgtaaaggtacgttcctgcctgggggcaccatgctttaccgggccaaatttaataatattttcgattatctgtgctttcggggcgttttgtccttcggcgcctgttggcgtccggtcgatgccgatgccgtgggtgacgatcgccgtgccgttggtgcggccgtcgacgcgcacctcgagggcgtcgcgcagcgtgccgtagcggggatcggcctcggggatgaggtaggcaacgttgatcgatccctgttcgcccggtgcgatctcgcgcggggcggtcaccgtcagcagcccgctcgattccagcgggcgcagttcgagccggatggttttgcccgaggtgttcgcatagccgatggcggactgtacctgttgtccggggcggatgtaggagaaggcgttgagggtcgtggagagccgcagccctccgcccgcatcgaccgggtagagctcctcggtggatttcatgcgcggcgtgacattgccccggatggtgagcgtggcgacctttttccgctcggaggagtagacgcccagttccttggtgaaggcgccggggcggttggccgggtcgaatgtcaccttgacggtggttttctcgccggggcggatcggacgcttggtgaattggggtaccgtgcagccgcaggtggtgaccacgtcgaggatcaccacgggcgtattgccgcggttctcgcccgtgaacgtatggctcacgcggccgtcggtttcgcggatcgtgccgaaatcccaggtgtcgggggtaaagaccagttgtgcctgcgccgccgttgcgaaagcgcaaagggccaagagtgtgaggaggatatgtcgtcgtgccgtcatggtgctgattggtgtctatgatgcaaaggtacattttttgagaaaaaatcgtgcaataattttgcgggaatgaaattttgctatatatttgcactccgaaacggttgaaaaaccgatttccgaatgcctgaatagctcagttggttagagcacatgactgttaatcatggggtcctaggttcaagtccttgttcaggcgcagatgcgcgagggttgcgtaaggttctttcagaaacgcctgcagggtaggtgataaaaagaatgaaaaatttcgatgaaaaatttggagttcatgtattttgaattacctttgcagtcccaagccattcactacgggagcttagctcagctggttcagagcgtctgccttacaagcagagggtcgggggttcgaatccctcagctcccacaactgaaaatcagccacttacagtaatgcaagtggtttttttgtgccgggagcatagctcagttggtttagagcgcctgttcgacaagcaggaggtctgcggttcaaatccgcatgttcccactaatgaaaatcaagcagttacagcaatgtagctgcttttttcatatgtgctgttttcgtggtttactgctgtttttagctttcgagttaaaccgggagttaaaccagaaaaccacatggcagcaggtattagcatcttgtgttacaaatcaaaaatgcttgcaaacggagcgcacccgctgatgattcgtttctgtaaagatggaaagaagagatatatgtctttgtgcggcgtcttcggtttcggatctgttcctgaacatgcggtacaggaaccctgctgttttcgcggcgcacttcatatacggcgcaccgaatgcggaacggtctgggcggccggtgcttcggggtgccggctcgcttcatccatgatttccgcggggtttcatggtatgcctgacggaaacgggccgccccgcaaaaagggcagcccgctcgatgtatacggccgggagggtcaataaccctcggcctcggtgaaatcgttgctttcgttgaaatgcgtctgtgtgtagacatggttgaaactgtcggtcgcacgaaccacgatgccggtcgcttcgggatttttcagcttgcactggtattggtggtagcaggggctggtgccgctttccaccggatgtttctcgaccccgatgtggtagccgcggatccagcggtcgccgtagctctgcgacatctccgtcataacgctccacgtcttgcctccgtcttcggacagttcgactttccaggtcgcgccgtccatcccggacgtgaagacgttggctacgactacgtccgccccgacatcgtatttgtaggtcgcataggggcctgcgaactcggcgttgccgcgatagagccggatctggtagtcgtcggcgcgctgcgaggccttgaaataggtgtcgatgatttcggtgccgtcgatctcgtagaccatgaagccgttgggcgtgccgtcgccgccgcatgtcgaacgccagaaataaccgcacgtgccgccgtggatgcgttcgaagagtttgtgcgagcgcatgtggtaaggctggaaatagtgcgtatgggcgcacatcagggtggggttcttatacctggagatcatgtcgagcacctttttgcggttgaggtagcccgtgttgtcgcgcagcgggatgtggtagtagaggattaccattttatccgtcgggacgaagccgaggtctttctccagccatgccacctgctcgtcggtgaagccgcccgtgtagtccgtgccggtgaagatgatgttgtccatcgcaatgaaatgcacgtcgccgcggttgaacgagtaccagcgcggcccgagcacgtcgcggtaggtgtcacccgtatagtccaccgaactcttgtcgtggttgccgatcgtggtgaagaacgggacgcccgtttcaccgaaggcgcgtttcatcgaggtgaaggtctgggcgtcgcccttgcccaggatgtcgccaagggcgatgccgaccatcgggatcgagtacttggcggcgatcttcttcacgtcgggtaccgtttccgtgcggaaccgatgtatatggtcgttgttgtcgggctgcgggtcgcccagcccgaagagcaggaaccgcttgtcgctttgggcgagcttgctaagcgtgaagtctgcccggtagggtttcgaactgctgccggtgacggagttggccgcctggtaggcaccctggtaggagccgaagttcgcctgtgccgggatctcgtaccccgaaggcacggagatgaatacgtgcttggcgttggggtcgcgcacgatctggtagacgcccttcttatcgctcgccacgacgctgtacccgtcgcttacgacgaccccttcgagggggttgccctccttgtcgcttaccagcccgtagagggtgatgcccttgtcgggcgtgatctccgttttgcccccgtcgtcatcgccgccgggtttgggcagttcggtgatcattttgtcgtctccgccgcaagccatcattgccgcagctaccagtgctgcggccgggaggcggagtttccggcggaaccatgtgaagattgaatcgtttttcatagtttgttttactgtcaacccgaccgccggttcgggcggtcgggtcggtgattgtcaattaccagttggggttttgcggaatgttggcccgctgcaactcttcggtcgggatcgggaagaggtagtgcttctcgaggaatacgcggtcctccttccagaagcgttccatgcggtaggttttgccggatatcgatatcttgccgttggggtcttccacggggcgcatgccgcagatgcggtgctgcgtcttggggtaggcgccgtatttgtcgaaatacaactgtgccttctggtcgttcgtcccctggatcgaactccactgggcatccttggccagttcttcggggctggtcggttcgaggtagaaccgcgtcgagaagaagcggctcttttcgtggtagagctctacgcggcgttcgcgcaggatgtagtcgagtagcaactccttgttggtctgcgcggccggcgggatgggggccatgaacgaacgggcacgcagctcgttcatcaggttgtagacctcgggggtggcgcccttcgagcgggtgaccgcttcggcatagaccaggtagatcgtcgccaggcggatcagcggcgcatcgaagttccagttgcccgacatgcccttggtgtaatagccgtcgaaatatttgcgggtgaagtagcccgtcgacgtggagttggcggcgttgatggcgtcggcaccggtggccgtgttgatccacttgcccttgaacatggatccgtggtagatgatgtcgcggtagaaacgcgggtcgcggttgacataggggttgccgtcgtcataggccttggccatgtcctcctcggagatcaggctgccgtagagcgccttgtggttctgcttgagcgcatagatcggataaccgtagccgtcggggccgatcacctcgtattcgtccacctgatcctgtacgggaacctcgcgtgcctgtccctgcgccgaaggcgggtacatgtcgttgtggtaacccacggttttgcagtggaggtggaagaagatccattcggctttcttggcgtcgttcatcgtgcggtggaacagctcccacaggcggctgtaaaccgcgccgttgctctgatccgtgccgcccgagtcggtcgtctggcttttgggcgaaccctggtagagcgagtagcgtttctgtccctcggcctcgaaatccatcacggccttggcggccgcggctgcggcgtcccaacgcgcggggtcgtacgactggtagaccgacgcatagttgcgggtgtcgcctttgagcgtcgacccgttgtagagcggcgtggctgcgatccagagcgccatggccttcagcgccaggcaggcgcctttctccacgcggccgaactgatccatcaggttctgcgccgagacgcgggcataggcctcgtcgcagtcgcgacagatcttctcgacgatcgtatggatgttctcgcgttcgaacggcggcagtgcgttggggtttaccgtatagtcgacgtaggggcattcgccgtagcttttcagtacgcagtagtgcaggtaggcgcggatgaagagcacctcgccgatacgctgcgagagcgtgccggggcgtgcctcggaatccggggtgttgtacttctcgataccttcgaggatgacgttggcgcagcggatgtcttcgtagagtttgggccagaaggtgtggcaggcacccgcattggtcgtggcgttgcacgaggtgtagagctgggaacccggttcccagtcgccgtcgttgaacttgttggaccatccgttctcggccgaagagccttcgcattcgtccgtgagcgcagagtcgctgaagaaacggatgtgcacgagcggctggtcggcggcgcgggcgtagaagtagagccggttaatcaggctttcagtctcgttgaaacgcgagaatatgtcctgatccgttttgtcgccctgcggggtcttgtcgaggaaatcctcgcaggaagccatcagcgtgactgcaaagcagctacagagcagatataagatttttttcattgtcattggtttttgttgggttagaatgtcatgttaaggccgatgttgatgacacgctgtacggggaaccagctgccgtcgccgttcttgatctcgggatccatgtcgacgtcgcccaggttgtcgaacgtgagcaggttctgtccctgcacgtagatgcggacgttctggatgccggctttcgaagtccaggctttgggcagcgtgtaaccgatctcgacgtttttcaggcggatgtacgaagcgtcgtagaggaagaggctcgaatactgctgtttattgttgttgtggatgccgtagtgcagagcggggtatttcgccgtagctgccgtttcgggcgtccagcggtcgaggtgcatccggcgcaccttgccgatacgcgactggtcgtagagcgggaaatcccatacggccgggccgctcagctgtacggagcagagtgccgagccctgccacagcatgctgaagtcgaagcccttgtaggagagtcccagcggaataccgaactggatctcgggcgtacgggggttgccgatggcggcacggtcgtagttgttgaccacgccgtcgccgttgaggtctttgtagaccacgtcgcccggctgtacggggccccagatggcgaatccgctgccgccgttcatcgcgttcaggcggtcggcctcgccctggtcggccacgaagtggtcgaagatgtagcagaaattctcatcgaggcgtttgccggtctggtaacgccacgggcagtcacggccgttgttgtcgatgtaggagatttcgttgcagtattttatcttgttgcgtgcgaacgtgaagttcgggcggatgtagtagcggaaatgctgcccgatatgaccgttccagccgatttcgaattcgacgccgtggttgtcgacgatacccgagttgacgatcggggcgacctgcccgacgatgtaggggaacccgaccttgtcatcccccgagagcgaagtgaggatgtcgtagcggtgctccttgaagatatcgagcgtgaaggtcagccgctggttgaagaactgggcgtcgataccgaagttgaacttgcgggccttctcccacgtcaggttcggattggcgaacacgccctcgaccaggtagctggtatagccggcctcggtctcgccgaaataggtggtcatgccgtccgacgacttgtagtattgcaggtaggagaaacggttgcccgaaagctggtcgttacccaccagaccgtacgatgcgcgcagcttgaggtggtcgagccactttacgtccctcatgaatcgctcctgcgtgatgacccagccgacggcgcctgccgggaatacgccgtagcgcttgccgcgggcgaagttctccgagccgttgtaaccgatgttgaactcgaagaggtacttgttccggtagtcgtaggtcgcgcggcctgaaaatcccatgtagcgatagggaacctggttgctgatgaccttgttctgcaggtagaagagcagcatgcccgacacgttgtggtcgccgaatttgcgggcgtagtccaggcgcgcctggaaacgcgacgtcccttcgggcgagccgtggctgatgctgttgctttgcgcatcgtccgtggttcgctggttggcggttacataggtgccgttcttgatccagtagtcggcgttgttcttccactcgtcgatactgtattcggtggggagcatccacgtcgaatagcccgggtaggtcaggttgcccgtgctgtgggtcggcacgctgttgttgatggtgtgctggttgtaggtgtcgtaggagaactgcgcggcgacgctcaggcccttggtgatgaagtccaggtcgtggctcagtttgaacgatccctgcaggtagcggcgcgtacgtttgctgaagccggtgcggttgagctgcccgagcatattgtaacggtagtcgttgtcggcatagagcaggtagccgccgttctcctcgaaatcggcctggttgacgtcgttgtggttgttgggcaggatgatcggcaggtaggggggctgcgtgttggccagcgagatgatgttggccgccgtggcgcccgggtagttgtattccgtgacgcgggcgcccaggtcgaccgagatcttcagccgcttggtggcgtcgacatcgacgttggcgcggaagttatagcgcaggaacttgttgacgttgtcggagttcgaatgcttgtagttgccgccctggttgtagtagctgccgaggatgaaataacgggcgcggtcggtgccgcctcgtaccgaaaggctgtaatcctggaggatcgacggtttgaatgcgtagtcgaagtaatcccagttgtagcccaggccgtcggagttgtcgcccttggcgcggcggaaattgctgatcgtctcctgggagaagagcgatgccgagccgggatccagcgaggggttgtcgttgagcatcgcctcgttgtagagggtcgcatagtctgccgaacccaggtagtcggggtaacggatgggttcgctgacaccgaccgacgccttgaaatcgacggtcggtttttcgccttttcggccgcgcttggtcgtgacgatgatcacgccgttggcgccgcggataccgtagggtgccgtcgccgaagcatccttgaggatcgtgaaggtctcgatctcgtccggggagaggtagctcatgtcgcgctcgataccgtcgacgatcatgatcacgtccgacttgccgtaggtcgatttaccgcgaatgttgagctgtgcggcgtcgttacccggttcgccgccgttgaactggttgaccagcaggcccggcatgcgcccggccagcgcattgttgatgttggccgtgggggactgcttgaggtctttggtggtgatcgtcgagatcgaaccggtgatggtctccttcttctgtacgttgtaacctaccaccacgacctcttcgagcgccttgctgtcctcgaccatcgtgatgtcgatcctcgtgcggttgtttacgtttatctcctgcggggcatagccgatgtaggagaccatcagcgtcgcttcggcgtagggaaccgtgatcgtatagctgccgtcggagttcgatacgctgcccgaggaggtgcctttgacgacgatggtcacgccgatcagcgggcttcccgcgtcatccttgatgatacccgagaccttcagctgcgaggaacgcgcctgggtgtccggggcggctgccgtcctgtccggagaggccgtggcggcccctcccagacaaaacagacacaatatcagtgttataatatgatatttattcataaccgtattgtattcttattgggttttactctcttgtcgtgattctgattgtcgtttccgccgaattggttttggaagcctcgtcgcatacggtcttcttatcttcgacacccttttcccaggttttctggaagacatagaccgctccgacgctggtcgcctggtagagcgtcgcatcgatggtgcacttgcaggtgcagttcgtgatcgtggtgaccttgtcgttttctatggcgacgatgccggccacgatcgggcgccatttgtcggttttgtggttggccactgccgtaatgtcgccgtagttctcgcaaccgtcgaaaacggcattgtcgtctccggatacggcgatacccgcgatgtcgcgctcgacggccgccgtgaggttgccgcggttgatgcagtttttcaacgtgaaggctccggcgaccttgccggcgatgccgcccatgtagaagaggtcgtagtcggccatcgtggggctggtcatgttacctgtgttgatgcagttttcgatcagggccggcgacgccaccttttcggcaatgccgatcagaccgccgaccgatgccgtcgacgccgcgatgtcggcctcgttgcggcagttggtcatcctgagcgtataacccaggcctgcgtccgatccgacgcagcctacgataccgcccgtgcggcgatatttcgtgccgttggagttgttgaacgtgatcttgcccttgttgacacaattgtcgaacacgccgtagccggtggccaggataccgcccagcgagtggaactggtgccccggatcggcgaaggtgacggtgaaggtgccttcgttggtgcagttgctgaacgtccagttcgatttctcggcatggccgaacaatcctccgtattggccggtgtcgacggcgcccgggaagtcgaagctgaaattgcctttgttcgtgcagttcacgagcgacccttccgttttgtccgcggtgccggcgacgatgccgccgatgaactccgtccgggctgtccccgtgatgatgaattcgcccgtattgtggcaatcggtgtagaccgaaccgacgttggccaggccgatcagcccgccgagataacctgccgtggcaacggttttcgccccggagaaggacagtgtggccttgttggtgactttcgtcagtgccgcgccgttgttatagacggccagcgtgccggctactaccggggtggcttgcgatacggacatgctgcccgccagcgagaggttctttatttcggccgttgcgtcgagcgtgtggaacaggccgagttccttcgagtcctgatccgccagcttgacggtgatcgtattgttcaggccgtcgaaagtccctttgaacggattggcggccgaacctacgaagctggtttgggtaagggtgctcaggtcgatgtcgctgacaaggacgatcctgccgccgttggtgtaggcgtcgagcggcgccccttcggtcaccgcgttgccgaaggctacgaactcttcgggggtcgagatgcccttccagctcaggcggacgctgaacgatgccgtgagctcttccgccgaaacggctgcgaactctatcgtgcccgcaccggtgcagtccgcgccgtcggccggagccgtgactttgagcaccgaattttcgatgtcgagtgcgatgtcccagcctttgagtgccgtgatgtcgcacgtggctacgttggtgacggtgcaggggatgtcgcgctgctcgccgaaggcgaatttgtaatcggcctcggcaaaggagatgatcggcaacttggttgagagttcgacggggatcgacgcaccctcgccggccgtcccgcggacgctcagcggcgtaaccttgacgctgccttccatggccgggtcggcctcctcctgcgtgggcgcggtgacggtcagcaggcccgcatcgacatcggccgtgtaagtccatcccttggggacgcttacgtcgagcgacgcggtgttctcgctggtgaattcgaattccatgctcttcccgtaggagaatacatgggtcttcgagattgtctcttcgtcgaatgtgagcgtgatgtcgttttccagggcggctacggcgagcgtataggtctccgtgcggccggcctgagactgtatttcgatgaccacgtcgccgctggccttggctcccaggtcggaagcggcgggcgcagtgaccgaacagctccgggagctggggatcacggtgcatttccagcccgtgggcggggtggccactgtataagtgacgaatgcactctttaaggtataagtggccgtcgtgccgaaccgcatgctttggaggccctcgatcaggttgccctccgcgtcatagagttcgaatacgatcgcaccgtcttctgcctctacatcctcgatgccgcaggagctggacagcaatagcggtgcggcaaaaagcatgtaaataagaaaatgaagagattttctcataaatgaaagttttagggttgaatatttggatgaatgaatggttcgtagtcgtaaaagtccggggtcgcagtctttactttgtcataggcatgtccgtattttaaaggttggtgaaaagatattgaatgaaagacaaatgaagatcaaagagaaatatattcgatttcctatcgtgctcttttgtgtttatttcagagaaaatgccgctttgttgtttgtaaaagtatgcttttgggaaatgtgtgtcaacagcatcaaaatgaaatatgaatgcgtatttcaaccaatattctggtaaatagcatgttatttccgtaggccgggtgttattatatgaattccgtatgaattgccggcgcgggatttccggctgtcagacgatctccatgatccggcgttcgaattcggcgggcgggcattttgccgcgttccgcagccggttgcggtaggtgtagaccgtatttatggagatatgcaggaactgggcgatttcgctgttgcccgtgatgcccagccggatcacggccagcagccggaattcggtgttgaggccggacgttttcatttgctccccgtcccgcagcagggcattggccttttccacgaagtcgggataaagcgaaaggaatacccggtcgaattcgtggaagaacgatttgtattcctgctcgatgggcgtaggcgagcgcaactcacgcaaaaggcgctcctgcccgtacgagagcgcagtcttgtagaggtgtgtgcggtgacgttctaatttgttgatgtagaacgtgctgcgttgcatgtagtaacgcaggtatttgtctttgatggtattggcctgggagagttcccgggtggctgtttcgtggcggaggctgcttgcggcgagctgttcgctgagttcgtgcagccgggcgtcggtttgcgcatgctgcgcacgcaaccgtttgatttggtgtttttgcctgagggcgagcgagatggccgccagtaggaggaatgcgcccgttgcgatggccggcagtgcggccttgcttttccgcgggcttcgggcttgcgtgatccccgctgttgccggcgcggggtcagcgttgtttttgccggcttcgccgccgcgcgaagccgacaggactattcgttccggcagtatgttgccggctcccgaaattaaaagagggaaatcccccccccacgcattgtgcggacgataaagtcatttgtcgggacgcagcagcagatcagcaggccggtaagcagaaggaaattacggttcatatctggtcgagggttaggttgtcgtaatacaaatatacattttaaaatcgggactgccgggattttgtccgggcggttgcgattttaatgcgttttcagtccgccgggcattgcaggaattcgccggtggcgtcgccgtaatccccggcccgggttatccggttctgggtgtaggtgttgccgaagggggcggtcgcacggacgactaccttggcgtcggggtttttcagtttgtagctgaacaggtggtggcacggtgcgctcgcgctcttcttcgggaaactttttaccccggtgtggtatcccctgatccagagatcgccgatggaaggatccattttctccatttcgccggaaagttccccgtcctcgaatacctcgattttccatttgccgcccatgcccgcgaaaaatacgttggcaagtatgacgtcgctgcccatcccgtaggtataagaggctcgttcgctgccgaaaatgtcgtccccgcggtagagccggagctggtagtcgcggctgtgccccgtacctttgaaataggcgtcggttatctccgttcccgagaccgtcatgaccgaatagccgttcgggacgccgtccccggcgcaatgcgaccgccagaaataaccgcaggccgcacccatgatatattccgacgtgccgtattccgtttccatgtagggttggaagaaatgggtatggccgcatgcggtcactgtgttctcatagggggctatcagcgaaaaaacggcgtcgtggttcctgtgcgaggtgtggtcgcgctcggggatgtggtaatacaggaagatcattttgtccttgccgacgaaggcgagatcctgcctgagccactgcagctggatgtccgagaacccggcatggtatttcgcgccttttttctgctcctcgaaagagtctacgttgtccatgcacacgaaatgcacgtcgccgacattgaacgaataccaacgcggccccagtgccttggagaaggtttcgccggagtaatccatggcatccttgtcgtggttgcctgccgttgcgtaatagggcaccccgagcgttcccattacccgcttgtgtttcaggtggctctgcccatcaccccggcccacgacatcgcccagcgcgatggctaccgcgtaggtgccggcctggccgagcgtgcgtttcatgtcggcgatcgtctcccgttcatagcggacgatctgctggtcgctgtcggattgcgggtcgccgaccagcaacagggtgaagttttgttgggactgcggtacggtgcgtaacctgaaatcggcgcggagtttccccggttttccggctgcaggctcgatcgggacgtaaaaatcggggtagctcccgaatccctgctggcctgtcgtctcgtatccggccgggactgagatgaacaggtgcgtggccgaagggtcgcacctgagcgtgtaccgtccttttttgtcggttgcgacacaattgcggccgtcgcttacgacgaccccggacaccggggttccggtttcgtcggtcactttgcctgaggccgtcgcggagcaggtttggccggagattccggcggcggtgtcctgggcggcagcgggtgtgccgtagccggtttgcagggcgaacagcagggcgaacaggatggataatctcccgcggcggaggtaggctgaaagagtccggaatttcttttccatcgtattttagctttaaagttatggcaaatatataagttttattttaatacaggtattaaaaagagattaaaaggaaatttatttttgattatttgttgtgtttatgttgctatttgtcttgccttttattacttttgtccgcaacgtagtcgaagtccggtcaacttccatcttcttttcatcactaaatttttaagcaagcaaatatgaaaaccatgcgatttatcggaatcgtcctcgctttgttttcggcgggaagcccgccggctgcgcaggcgcaggattccggaaagaaatacaaggtctatatggtctccaattcccatctcgacacgcagtggcggtgggacgtgaaagccacgatcgacgattacctatataatacggccgtgcagaatctggcgctgctcgaaaaatatccgcattacgtgttcaatttcgaaggcgccgtcaagtacgaatggatcaaggagtactatccgcacctcttcgagcgcatccgaaaattcgtagccgacgggcgatggaacatttcgggggcttcgttcgaggccaacgacccgaacatgccgtcgtcggagtcgtttatccgcaacatcctgcttgcacaggagttttataaaaaggagttcggcatcaagtcgaaggatatgttcctgcccgactgtttcggattcagccaggtcatgccgacgctgggacaccactgcggcctgatcggtttctcgacgcagaaattgtcgtggcgcaccgagccgcttgtcggcgactccaaaaccccgtttccgatcgggctctgggaaggggtcgacggcgcccgcatcatggtggcgctcgagccgggacgctattcgtggaacgagtttcccgaaggggatctgagcgccaacgaggaattggccgaaagtgcccggaagtcgcctttcggcatcgcttaccggtactatggcaacaaactggcgaacggagccggagaccacggcggctcggccctgccccgcagcatccagctgctcgaggaggggattacgaacggcaaggggcccgtgcagcttgtcagcgccacgtcctcgcagctctacgaggattatatgccctacgggaaccatccggaacttccggtgttcgtcggggagatgcccctcgacgtccacgctccgggctgttatacctcccaggccgagatgaagcgttacaaccgccgtaacgaacagttggccgatgccgccgagcgttcggccgtgatcgccgactggatgggagccgtaccttatccgaaagaggcgcttaacgatgcttggaagcgttttctctggcaccagttccacgacgaccttacgggaaccagcatttgggaggcttatacctattcctggaacgacgaattcctggcgcagggacaattctgcgatgtgatcctcgcctcggccggggctgcggcatccgtaatggacacccgcgcgaagggaagtccggtactggtttataaccccgccgcttattcgcgcaggagccttgtcgaggcgacggtcgacctgcctgcggaggccgaaggggtggccgtttatgcgccggacgggaaggccgttcctgcgcagatcgttgcccgcgacggtgccagggcgaccgtgctgtttgccgccgcgatggaacccgtaagctatgcggtatacgacgtgagggccggcaaggccggcaagggcaaggtgctcagggcctcgggcaatacgctcgagaaccgggtctataaggtgacgctcgatgcgaacggcgacatcgcctcggtcattgacaagcgcaacggccgcgacctggtcgaaaaaggcaaggccttccgccttgcggtgctgacccccaatatgtcgaaccgctatccggcatgggagatccacaaggcgacgctcgaccagacacccgaacccgtggatacggatgtccggatcagcgtggcggagtgcggcgccgcacgggcctccctgaaagtagaacggcggtacggcgattcccggctggtgcagtatatccgcctgaccgacggcggggacgacgagcgtatcgacatcgtggccgacatcgactggaagacgcccgacgccctgctcaaggccgaattcccgatgtccgtttccgccgaggaggccgtctacgacatcggcatcggcaaccagcgccgtcccaccaaccaccagcgggcgcacgaaacattcgcccatcattgggcagacctctcggacggggactatggcatcgccgttctgaacgattcgaaatacggctgggacaaacccgccgacaataccctgcgcctgagtctgctgcatacgccttcgaccgagaaacgctatgccgaccaacgggatctggatttcggacgccatacgatgacttactcgctcgtcgggcacgatggcgaccataaccgcgccggggtggtggagaaaggcgagctgctcaatcagccgctcctcagcttcacgacgccgaagcatcccgggaagctgggacgcaggttctcttttgtcgcggcttcgaccccgcagatcgccgtcaaggcgcttaagaaggccgaggacggcagcggttatatcgtccgtgtattcgagacgacgggcagggaggtgcgcggcgccgagctggctttccccgtgcggatcgtttcggccgaggaggtgaacggaatcgaggaacctgtcggggaagcacgattcgaaggcaaccggctgctcgtcgatgccgggcattttgctcccaagacctataaggtcacgttggcggaggctcccgtggccgcccctgcgatcgagaatgcctttgtggattttcctgtaaatcagaactccatttcgagcgacccgttcaagtccgtcgccaaggtggataaggagtgcaactcctatgctgccgagctcatgcccgaagtgatcgtccatggcggcatcgaataccgccgcggcgaacccgacgtgaaaaacgtgctgaactgcagggagtccgtcacggtcgatttgccgcagggcgattataacaaggtctacatcctcgcatcgtcgtccaggggcgaccgcaaagccgtcttcgacatcgacggccgcaagtacgaggctgtcgtgccctattactcgggcttccgcgcccagtgggcctgggccgacaagaccaagtcgttcgtcaaggatgggacgatcgcccatatcgggaaccaccggcacaagatgaacggccggaacgatgcctataccttcacgtacctttacaggctcgggttcgatatcgcccccggagccggaaaactgacattgcccgaggatgccgacatcaatattttcgccatcacggtctccgggaaccggatcgacgggacgcggtgggcctgcgagccgcgtgccctgcccgtgattgaataacggaaagacagtctatatgcgataagcccgctccggaacatccggaacgggcttattctctatccctttttcagtagtcacgcgatccgtagccgaggatgcgctatagggtgacggccctctgaaatgcaggccgggcgtcattgcggacgcggggcatttaccgcccgaaaaattttgcgatccgggtggtcgcggcagcacccaggcggaaccgtccccggatattttcgctttggggctgccgggcggggttgtgcagccattcgtggaagtcgacgtatatgcctttattgatcatgaattcgaaagctgcgttcttcagccttttttcttcgttgtaaccggactggatgttggcgatcaggtcttcgaacgcggcaaaattgtacgggttggaaactgggatttcggctgtgtaatgttgctttttcataacttttatcttttttataattgaagttttgtttcatcaattctaaacgacccaaagtattcggaatcggctccctgacagcgtgtgtatgcactgcaattttgccggcttgtccggcgggaaaatggtcggtatatgttgcgtcgaaaataatcggtacagcctgttttcgaatccggctgtattgccgacaggggtgttcactgccgcgatcgtgtcggcaaaggtagggacaatatgttgaaatccaagctttttgtgatgtttttttgatgcaaaaaatcgaaaaaaacttgcatcggattttattattatattaatataataatacccttgccggaaggggtaagaatccggagcgatttttcatgtcttttcgcttgttccgttatcggattaataatgttctgaattgcatcctggtggaaatggctttattattggagcggaagcccggtgcggagaattcgggacatacgaaattttttcgcccgatcggcgggaagccgccttaattttatacatttgcaaaatcatgtctcctgcattgcggataaaactttttttcgcccttgcggcgttgtgcctcgcctctgcggtaagggcgcaggacggcgcctatgccgtcagcggccgggtgatcgaccgcctgacgcgccggccggtcgcctatgccgccgtagtgcccgtcggacaggaacaacgcggcgcatcgaccgattcgctgggacgcttccgcctcgagcgggtgcgggcgggtattttccgcctctcggcctcgtccgtggggtacaagaccgtcgtcacgcccgaatacctcgtttcggccgccacgccgttcatcgaaatcgaaatggaggaggatgccacgcagctcgaagccgtgacggtcgtgccttcgccgttccgcgccacggccgaaagccccgtcgggttgcaggtcatcggggtgcgggagatcgagaagagccccggcgccaaccgtgacgtgtcgcgtatcgtacgttcgtaccccggcgtgtcgttctcgcccgtgggctatcgcaacgatctgatcgtacgcggcggcggcccgtcggaaaacaagttctatctggacggcatcgaaatccccaatatcaaccactttgccacgcagggcgccacgggcggccccgtgagcatcctcaatgccgatctgatccgcgagatcaatttctacaccggggctttcccggccgaccgttccggggcgctgagttcggtgctggacatccaactgcgggacgggaaccccgaaaaacagactttcaaggcgacactcggggcttcggaggtgtcgctgagcgggagcggccatatcggcgagaaaacatcctacctcttctcgctgcgccagtcttacctgcaactgctgttcaagatgatcggcctgcctttcctgccgaactacatcgacgggcagctgaaggtcaagacgcgcctttcggagcacgacgagctgacggtattggggctggcgggcttcgacaacatgaaactcaacctcgacgaggagggcgaagacgccgagtacctgctgagttacctgccccgtatccgccaggagaccttcaccgtcggggcctcatggcgccactatgcgggccgccatgtgcagaccgtgtcgctcgggcacacttatctgaataaccgcaacctcaaataccgcggtaacgacgactcgtcggaggacaacctgacgctgcggctgcgctccgtggagcagaagaccacgctccgcgccgaaaaccgcagctatctggggcgctggacggtgcgcgaaggcgccgagctgagctattcgggctatacgaaccgtaccgagcaacggcttttcaccgatgaggcggcgctctcggactatcgtacccggctggggatcgtgggctggggcctgtttgccggcgcggattatgcctcggcggacaagcgcttcacggcatcggtcggcgtgcgtgccgacggggccgactattccgcgcgcatggcgaggttctggcgtcagctttcaccccgggcgtcggtctcataccagctcggcaaagggtggtcgctgagcggaagcgccgggctttattaccagttgccgccctatacggccctgggattcaaacaggacggggtgctggtgaacgaggcgttggactacctgcgtgtgggaatgttcagcgtcggaggcggatggcgcctgcgcgaccgtctggtcgtctcggtcgaggggttctacaagaaatacgggaatatcccgctttccgtctcggacggcatcccgctctcgtgcaaaggcgacgactatggcgtggtcggcaacgaagcgctgcgcccgacggccgtcgggcggtcgtatggcatcgaggcgatggcacgctggcagatacccgggagggtcaacctcgtcggttcggtgaccctgttccgcagcgagtaccgtgccgatgccgcatcggagtatatcgtatcggcctgggacagccgtttcgtggcgaacctcagcggtatgtacgacctgccgcgcaactggagcgtcggggcgcgcctgagcgccgtgggcgggacgccctatacgccctacgatgtcgaaaaatcgtcgctggttgaggcctgggacgcccagggacgcccgtactatgactatgggcgttacaacgacgggcggctcgacgccttcgcgcaggtagacctgcgtatcgacaagaccttctatttccgccgctgtatgctcggcttttacatcgacctgcagaacgtaacgggcagcaaactccgccgtcccgacgtgctgatgtcgacgggcgtggtggagaatcccggagccccggcggcggaacagcgttaccgcatgaagtatatcgggcagcagagcgggtcgcttatccctacgctgggtgtcaccgtcgagttttagagggtacggtgtcgcgtccgggggatatcccgggataagggcgcggtatccggggtggcggagtcgggattccggcatgccgcagcgggaggcaggaatgtgtcgggaggaaaatacggaaccgcaggggtaggcatctccgacccctgcggtttcttgcgatccgggacgtgccggctgtcatttcccggtgcccggggtattcgtaccgcccctgcgatccatcgcgaaactgatgatgaacggcatggagaggaagacgagcgtgccgacggctaccagccacgtgtaggtggccgggctgcctacgggcagctgcgacggcgggaaaaaggtgacgatgaacgagaagagcacggccagaaacccgatgcccccgatggcccacatgccggcgttcccgcccgggacgcggtagctgcgggtcaggtcgggctgcgtgtagcgcaggcggatgcccgcagcgtacatcatcatatacatcaccaggtagagccctacggtcagtgcgctcagcaggaagaacgccacgctcacgtcgtccatgacgatatagagcgacgagagcagcgtgacgatgcagccctgtatgatgaggatgttgacctgtacgccgtttttgttggttttttgcaggaaacagggcagcacgccctcctgagccgtccacagcaggccgcggctcgggcccgaaatccacgacatgacgcctgccagtgcgccgaatgccacgagaagccccatgacgttcgagagccagccgatgtggtagtggtcgaagacgatctggaacgtggtgaacagccccgactggaggttgatctggtcgtagggggtgatgatcgccacggccagcgcacccaacgtgaagagcccgaacgagatcagcgccgccaggaacatggcgcgcgggaactgggtctgcggcttatcgagctccggggcatgtacggcgtgtacctcgacgccggcgaagagcaacagtatcccggccaggaatgcgatgtcgctcatgcccgtgatgtgcgggaagaggcgcggatgcacgtggtgcgccgcgtcgatattgacgacctggctgacggtgtcggggatgtgctccaatgcgacggggttgcctccggccatccagatgacggccatgacgattacgacgatgccgggaagcaccgtgccgatcaggaaccctttgctcgtaatgcccgatatggccgaggtgccgcgcagcgtgaccagcgtggcgcaccagtacatggcgatcgagaaaagccccacgaaaagtccgttctgcgccaggccgggcatcccgatcatataggcgatcgaggctgcggcaaagcccagcacggtggggtaccatacgacgttttggatccattgcaggaagatggccgtaaaccccaggtgtttgttgaacgcctccttgacccaggtgtagaccccgccgcccttcgaggcgaaggcgcttcccagttcggcccctaccagcgccgccgggatcaggaacaggaacgtggcgaaaaagatgtagaagaacatcgtcagctcctcctgcgccatcatcgggagtccgcgcaggctgataaccgccgccgcggtcatcagggcaagctgtgtcgtcgtgatatttttacgttttgccataatgtggaattgtgttttacaactggccgtcaatcagtttctatgccgcaacgcggccgggcggatgttttttcgggcgtgtgcatggtttatgcgggcgtttccgcgccccgcggggccctctgcgcctgcgtgttgaccgcctgcgggcggggcgcaaaaaaacagcagggaatctcacgattgcctgctgccttccggaggattgccctcctgaaactactaacccaaacttaaataaatgaagaaacctcactgcggttgctgttccgcagttacccggtatgttgcaaatcccgtgccgcggcgccgtgtcggaaaggcgtttgtgtgtgcggcgggggtgcggcctatgatacatgccggcgggaaagggcataaacaaccgcaggatgcccgtggggacatcctgcgtgtgctttcccggtaatatccgggttgcggaagggggatgcgcttaccggcgtttgtccctcatctccacggcgccttcgtaggtgccgctgaccttgcggcctttgtcggtcgtaaagtcgaggacgaagcggtagtcggtgccgactttggtgattgtcaccgtgccggacgtgatgaacccgtaaaccgattcgttggaggcgttgcgttcctcgcaataggtacccgtggccagcatggattccatgaattccatctgctcgcccggtgtgtaggtgcccggcgtgcccgtgtcggacacggtgtaggttccttcctggagtaccatttcttcggaaagtgcggtcgtgaggtagagcgataccatgtgcccggctcccatgaggtagtcgtaatcgtcgccgaccgtcggctggacatcgtagaggttcacgacgcagtcgtttgccgtgccggcatcgttgttatagtatttacccagggcgcggatgaaggtggcgttcgtgacgtcgttttcgaggtcgggcaggggctcgatggcactggcagtcttgtcctcgatcgtgatcgggccggtatagctggccgtgaactcgttgccgtcggtcgtggtcagcgtggcctcgatcgtaaaggccgaaccggattttgtcactgcgatcgttccggccttgaattccactttcgtgatgttccccttgccgtcgttgaccatgcagtaggtcttgtccgggtggaatgtcgaaaggctctggctggtcgcgtacctgtatgtacgatccggcaaggtaatgttgtccagtttgtagggtttcatctggaataaatcgaggctcatggcgcggccggcgttgacggtggcgtggacgccgccggcatcgatcgtttcgccgtcggccagtacgacgatgtattcgccgtagctgccgccttcggggatgccgtaataaccgcctgctacctggcggtcgaatacggccgggccgctcagatccttgtcggtggccatttcaatcgacttgacttcggaatagacctctttgttggatgctgcgacggcgatgatataggccgtgccctctttcaggttgtctgcggtgatttccccggcctgtgcgatggcggtgccctcggcgagaatcttctcggcagtcgggacgactgcacccgctaccttttcgatgcagaggtaggcggccttttcagcgttggtcagccctacggtgaaggtgagcgccgttatgccgggggctccggctgccagcgtcaccacgggcgtcggcgttccggttgccatcacgatgctgttgacttccgagtagatcccggtgttggcgacggcagccgcaatgacataggtggtcgagggtttcaggttttcgatcaggatttcgcccgttgcggcgatggctttgccgtcgcgcaggatctcctcggctgtgggaagggtcagcccctctgtcttttcgaggcagacataggctgcggtttcggggtcggtcagggcggcgttgaacgtaagggtcgttgtggtggactggcccggtgtcaggacgaccgcgggatgtacgccgggtgccgacgtggtgtgttcgatggagtagaccttgccgctgatattgcctttctgggcgacggcggagaggcggtaggccgtattgggttcgaggttgccgacctcgatgacgcccgatgcggttacggattttccgttggcgaggatttgctcggccgtggggacggtttcggaggccttggcgcagatgtagctgcatttgtccgcatccttgagcgtgagcgtgaatttcagcgcgttgaatgcggcgtcgccgatggcgattgtaacggtcgggtcaggatttccccccccctcgtttttgtcgtcgcatgagcttagcagaccggagcacagcaccaacagtgccgttccccatgacaggaaagatttgatcatagtggttaaactttggaaattagtgggttaatactgttattctggcgcagggccggccgtctttggatattcaatcaggttacggggcagccgtgcaatgtgtgacgggataaaagtaacctttctgccaagaaaatccaaattttttttatccgtgttgcctgaaagtgcgataaatcgggggtgagggtgccggggcgaaagggtggaggacaatatataacaagacagcagggaatctcacgattgcctgctgcccttggaggattgccctcctaaaactactaacccaaacttaaataaatgaagaaacctcactgcggttgctgtccgcagttgactatatctgttgcaaaacgcatgccaaaaaaagagcccgcaatcggaagattgcaggccgggtcgttttgtgcggacagggggcggggtgttattcggaacccgcaggtggaaaggtgccgcctgcggccggatatatgacggagaaaaggattccggttaaggcgagtgccacgcctgcggcgaacagtccgtatccccgcaagagcgcttcggcaccgcacaggaacagcccgcagcagatgagcagcaataacctgcccgtaaaccggcacagtctccgttcgaatgccgcacggtcttttcccgtcagcgccccgtatcctttgaaaaggtgtttgtaacccgtaacgagccacctgccccgttccctgaccagggcgatgcccatcggcaggagcaagagcgcgatggcggtcataatgacggatgcccggagcatgcccccgtgtttttaccggaagatgcccgtgtaggtcgcgggcgagagggcgcgcagctcctctttcaccgcctcggccacgtcgagtgtctcgatgaatgcggcgatcgactcgtgcgtgatatgggcgttggtgcgggtcagggccttgagcgcctcgtagggcttgggataaccttcgcggcgcaggatggtctggatgccttcggcaacgacggcccagttgttctccaggtcgcgctcgagggcttcgcggttgaggattaccttgttcagccccttcatcagcgagcggagcgcgatggccgcatgggcaatggggacgccgatgttacgcagcacggtcgaatctgtcaggtcgcgttgcaggcgcgaaacggggagcttcgacgcgaggtgtccgaagatggcattggcgatgccgaaattcccctcggcgttctcgaagtcgatggggttgaccttatggggcatggcgctcgaaccgacttcgcccgccttgatctgctgtttgaagtattccatcgagatgtacgtccacatgtcgcggcagaggtcgatcaggatggtgtcgatgcgcttcatgttgtcgaagatcgccgcgaggttgtcgtaatgctcgatctgcgtggtatattgtgagcggcagagccccagcgtttcgcccacgaatttgttggcgaaggctacccagtcgtactgcgggtaggctgcccggtgggcgttgaagttgcctgtcgcgccgccgaatttggcaggcaccgcgatgtcgtgcagcatggcgagctgtttctccacgcgttcgacaaagaccatgaactccttgcccagcgtcgtgggggaggccggctggccgtgggtgcgggccagcatcggcacgtcgcgccattcgtcggcgaaggcggccagtttgtcgcgcacctcttcgacggccgggtagtaaacccctgccatggcgtctttgagcgagagcgggatggccgtgttattgatgtcctgcgaggtgaggccgaaatgtacgaattccttgtaagcccccagtccgaggctgtccattttttccttgatgatgtactctatggctttgacgtcgtggttggtgaccgattcgatctccttcacgcgctcggcgtcggccggtgcgaaatcgaggtacagggcgcgcagggctgcgaatttcgtatggtcgatgtccgccagctggggcagcggcaactcgcacagcgcgatgaaatactccacttcgacgcggatgcggtagcggatgagcgcctgttctgaaaaataatcggctaatttccccgttgtattacggtagcggccatcgacgggggagatggcggtaaggctgttgagcggattggagttcatggatttatgtatggttttatataatacgcctccggcgtccggactccgcctgcgcccggcagggcctgcccgaaggctttgccccgcccgccggcaaagttccggcaccaaatttacgacatttaattgaaatacgcataattttccctacctttgtagggttgtaaaccgaaaatgcaatgaattttctgacagcgatcatagatggcctggtgaggttcgtgcagcgcaatccgctgacgaccctggtcatcctcatcctggctgtcggcgccccggcgctgctcaggggaatcgcacttttttttctctatttcattatgggagtcatcgtattggtagtagcggcgatcctgctgttccgctggcgcgtctataagatgcgccgccggatggaagaacagttcggcgaagggaacttcggcggacagggcttcggctcgccctttgcaggggagccccgcaagggtcgcgaaggcgaagtgaaggtatataaaacctcggaaacgcccgagaaacgggtctcgcgcgatgtgggcgactatgtcgaattcgaagagaccaaggagcccggagaggagtagcgccatgtggaagatatttgagttgatcggccgttatttcatgctgatgggaaaggtcttttcccgtccggagaaggctgccatctaccgccggcgcatcatttacgaaatggagtctctgggaatcgactcgatcggcctgacggccattatttcggtattcatcggtgcggtcatcaccctgcagatgtgcatcaatctcgattcgccgttcatcccccgttcgctggtcggttacgccacgcgcgagacgatgatcctcgaattttcgtcgacggtcgtggcgctgatcctggccggcaaggtcggttcgagcatcgcttcggagatcggcacgatgcgcattaccgaacagatcgacgcgctggagatcatgggtgtcaattcggcttcgtacctcatcctgccgaagatcgtcgccgcggtggtcttcttcccgttcctgacgatcctcagcatcgccatcggaatcatcggcggctgggccatcgcctacctgaccggcatcatgatcccggccgactatgttgacggactgctgatggacttcaagccctattcgatcgtctactcgcttatcaagaccgctgtgttcgcctatatcatcacctcgatttcggcgttctacgggtactatgccaagggcaattcgctcgaagtgggcgccgcctcgacgcgcgccgtggtggccagttccgtggtaatcatgatctttaacctgatccttacgcaagtcctgctgatatgatacgtgccgagcacatcaccaaatcgttcgacgggcgcgtggtgctcgacgacatctcgatcgagttcctgaccgggaagaccaacctcatcatcgggcgcagcggttcgggcaagaccgtgctgctgaaaacgctggtagggctgcatgaacccgattcgggcgacgtgtggtacgacgatacgaatttcacgcgtctcgatttccgcgagcggcgcgccatccgcaaggacatcggcatgattttccagggcggggcgctgctcgactcttcgaccgtcgaggagaacgtcaagctgccgctcgacctcttcacctcgcagagcgagaaagagaagatggaacgtgtggatttctgcctgcagcgcgtgcggctggaagacgccaaccacctctatcccgccgagttgtcgggcggaatgatcaagcgcgtggccatcgcccgcgccatcgtgctcaacccgcgttacctgttctgcgacgagcccaactcgggcctcgacccgcagacctcgatcgtcatcgacaacctgatccacgaaatcacgcgcgagtacaacatcacgacgatcatcaatacgcacgatatgaactcggtgatggagatcggcgagaaaattgtatacatccacgaaggccgcaagtggtgggagggtaccaaggacgatatcctgcatgccgacaacccggaactcaacgatttcgtattcgcctcggcgatggccaaaaaggccaagctggctgcaaagtaggcagccgggttcctaaaaaaatttaattttttatttgcgtaatatacataaagtatgtacttttgcgtagtgaaaaaatagtgcatttttttattaacaaataaatcataaaactatgtcaaagatcaaagttggtatcaacggtttcggtcgtatcggccgtctggtattccgcgctgcatgcaacaatgcagacattgaggttgtaggtatcaatgacctcgttccggtagactacatggcttacatgctcaagtacgactcggtacacggccgtttcaacggtacgatcgactataacgtggagaagggccagctcatcgtgaacggcaacgtgatccgcgtaaccgccgagaaggatcccgcaaacctgaagtggaacgaagtcggcgccgagtatatcgtagagtcgaccggtctgttcctgaccaaggagaaagccgaggctcacattgcagccggtgccaaatatgtcgttatgtcggccccctcgaaggacgacaccccgatgttcgtatgcggcgtgaacaccgacagctacgccggccagaagatcgtttcgaacgcatcgtgcaccacgaactgcctcgctccgctggctaaggtcatcaacgacaacttcggcatcgtcgagggtctcatgaccaccgtacacgctaccaccgcaacgcagaagaccgtagacggcccctcgatgaaggactggcgcggcggccgtgctgccggcggcaacatcatcccctcgtcgaccggtgctgcaaaggccgtaggcaaggtgatccccgccctgaacggcaaactgaccggtatggcattccgcgttccgacgctcgacgtttcggtcgtagacctgacctgccgtctggagaagggcgcttcgtacgacgagatcaaggctgccatgaagaaggcttcggagaacgagttcaagggtatcatcgagtacaccgaggacgacgtggtttcgaccgacttcacgggtgacgccaacacctcgatcttcgacgcaaaggccggtatcgcactcaacccgaacttcgtgaagctcgtggcttggtacgacaacgagtggggctactcgaacaaggtcgtgatgctgattcagaagatggccgcttacaacaacaaataatcgtaagccgtcgctataatggaagaaggaacccgcgtgggttccttcttttttttgtggcagcgggaagggctgaggttgccgggctgccgggctgcctggcggcgtgtcccggggcggcgggcgttgtcccgagatgcccgctaccgggcttcggaatccacgcgcatctcgatcgaggcgcccgaccactggttgatgaggcgcttctccgcgcggagccgccgcccgccgtatgcgatgcggatttcgacttcgaagggtgccgtgtcgccgatgtcgttgccggccggcagcgtatggggtacgatatagatgtagagcagaaggtggtcgcacggcccggtttcgaggcttgcgcggccgtcgccgggaatcccggcgggcttttcccgcaggttcgagccgacgtcggcgacatgcgcctcggccgatgcgaagcccgtgcggttgcccgccgtgtcgaagcagccgcacatcagtgcgacgttgtagcgccaccaaccttcgtagcggctcgaaatctcgattgtgaatccctcttttgttgccatacggtgcaaatatagcgatttttaccgaagatggaatccgcggccggaatttccggagcctgtgccgtgcctcttctgcgggcgggcgaccggatatccgggagtgcggggatgctaaaactctgcattttctttgcaaatgtcttatattttcgtaactttgtgccctaaatgcgctcctatggaggaaacaaaaagatatacgattgcttacagggggctcaggagcggcctgcacgactttcatttcaaggtcgacggcgggttgttcagggcttacggcagtacggagatcaaggacggagactgcgatgtctcggtcgccctggagcgcggcgagtcgatgcttacgctcgatgttaccgtggacggtagtgtcgtcgtggagtgcgaccgttgcctggaagactgcaatgtgccgatccactacgaggggcagttgctggtgaaattctcggacgaggtgcacgagtacgacggcgaagtcatgtggctgctgccgatggaggacgaagtcgacctgacgcagtacatctacgaaagtatcgtgcttgcgctgccttatcagcgggtgcatcccgacggggagtgcaatcccgagatgctggaacgcttccgcatcgtttccgacgaggagttcggggggatcgaagcccgggccgaggccgagggtcgcaacgagggcgaatgggccaagctggccgcgctcaaggagcagatggaggccgaccggggggacgggacgcaaacagaacgaaaggaataagctatttccggccggggaggcgcttttgtcccgggccggggaatatttgactggaaatacgttaaacttataatttatattgtaaaatggcacatcctaaacacaaagtctcgtcgacgcgacgcgataagagaagaactcattacaaggctgtcgttccgacggtggtcatctgctcgaactgcggcgcagctacgttgtatcaccgcgtatgccccgaatgcggtttctatcgcggaaagctggcgatcgagaaaaaggctgccgaataaatcggcagggttaaagagtgcatccgcgaggctgccctctttttagtttatgcaagcacctgtctttgttgcgtgcggccgtccggcctatggccgggatgccggcgcagggagggcgggagatgaaatttaaccaaatcgcacgattatgttaaagattggtgtagatgccatggggggcgattatgcgcccgaggctgcggtcaagggggctgtcatggcactcgatgcgatcgggccggacagccgtatcgtattgttcggcgacgaggcgaaggtcaaggccgtgctcgcggccgaaggctgtcctgccgaacggttcgacatcgtcgccactaccgaggtgatcgaaatgggcgatcatcccgccaaggcgttccaggccaaggccgactccagcatcacggtgggtttcggctacttggccaaaggggccatagacggttttgccagtgccggcagcacgggcgccatgatggtcgggtcgatgtacgccgtaaaaccgatcgaaggagtcatccgtcccacgatctcatccatcattcctacggtcacggggcatcccgcgctgttgctggacgtggggctgaacgtagactgcaaacccgaagtgctggcgcagtacgggctgataggctcgatttatgccgaagccgtactcgggatccggaaaccccgtgtagccgtgctcaacatcggcgaggaggagaccaaaggcaatacgcagtccaaggccacgtatgaattgctgaaggccgacggctgcatcgacttcgtgggtaacgtcgaggcatcgtacctcttcacgggcaaggtcgccgacgtggtcgtctgcgacggtttcgtgggcaacacggtgctgaagatggccgagggcctctaccacatcaacaagaaactcggcggcggaaacgctttctgggatgcgatgaattacgagaacgtgggcggcacgcccgtgctcggtgttaatgcgcctgtggtcatcggccacggcatctcatcgcccaaggcaatcaggagcatgatcctttcgaccgagcggtgcattacggcggatctgaccgccaagttgcagcgcgctttcaaaaattaataatcattaggtaaagaaacagttaatgggcaagataacagcagcaattaccggtgtgggtctatatctccccgattatatcctcaccaacgaagaattaagcaccatggtcgacacgtccgacgagtggatcatgtcgcatatcggcgtcaagacgcgccatatcctcaagggcgaaggcgtcggcacttcctatatgggtgcccgcgcggtcatcaacctgctggacaaggcgggtgtagacccgatggaggtggatctggtgatctgcgccacggtgacccccgatatgttcttcccttcgacgggtaatctgatcgccgaccaggcgggttgcaaaaacgctttcgcatacgacgtttcggcggcttgcagcgggttcctcttcgcactgacgacgggcgccaagttcatcgagtcgggatcgtgcaagaaggtagtcgtggtcggcgccgacaagatgtcgaccatcgtcgactataccgaccgttctacctgtccgatcttcggcgacggtgccgcagccgtgctgctggaacccaatacggagggttacggcgtgctggacgagatcctgcgttcggacggctcgggcgagttacagctttacatgaaggccggcggttcgcgctatccggcttcgatcgagaccgtgcagaacaactggcacacgatcatgtgggacggacacgccgtattcaaggccgccgtttcgaagatggccgacgtatcggtggagatcatggagcgcaacaaccttacctcggacgacatccgttatctggttccccatcaggccaacctgcgcatcatcgacgctacggcacgccgcatggggctcgaccatgacaagtgcatgatcaatatcgaccgcaacggcaacactacggcggcgacgatcccctcgtgcctctacgactacgagaaggagctgaagccgggcgacaacctgatcctgtcggcattcggcggcgggtatacgtggggtgccatctatgtgaagtgggcttacgacggttcgaaagcctgccaggtcgatcctgccgagaaataatccggtgcgggcgggagcccgcccgaaagcacaggtggggcggaaacttatacggtttccgccctttccgtaccggaaccgcacgtgccggagcggcggatgcgggattttttcgtatatttggacttgggcattgccgccgcggtttcagattcttttcggattcgcggtctaactttgccccgaagaatattgctgcttatgaaaatcctgatcgtggaagacgaaccctccctgcgggagatcatggtgcagacgctgcgccgcgaacagtatgtggtcgagcaggcgtccgattacgcatcggcgctcgaaaagatcgccggatacgattacgactgtatcctgctggacatcatgctgcccgacggcagcggcctgcggatactcgaagagctcaggcggcagcgaaaacctgccggcgtgatcatcatttcggcccgggattcgctcgatgacaaggtcgaggggctcgagctcggggccgacgattacctgcccaagccgttccacctggcggaactgagcgcccgtatccgcagcgtcgtgcgccgtcaccagcgcgacgggcagcagagcctcgatgtggggaatgtccgcctctaccccgacagccgccgtgtggaggtggccgggtgcgaggtggaactgctgcgcaaggagtacgacatcctctactatttcatgagccgcccgaaccatatggtcgataaggccacgctggccgaagccgtgtggggcgaccatatcgaccaggctgataatttcgatttcgtatacgcccagatgaagaacctgcgccgccggctccacgacgcgcaggccgacatcgagatccgggccgtctatgggttcggctataaactcgttgccccatgaggttggtctatcgtatcgtattgcacatgtcctgggccctctcgctgttgctggcggggtgggccgtgttgttctacctgacgatgatcgacgagatcaacgacgaggtggacgattccttggagaattacgccgagatgctggtcacgcggagcctcgcagggcgggagctgcctgcggcctattcgggcagcaacaacggctattacctgcacgacgtgtcggcggagtacgccgaagagcggccccggatggagttctcggacgaggtgtttttcattcccgacaaggacgacgacgagccggcgcgggtgctgcggacgatattccgcgacagcgggggacgttacaaggagctgaccgtgatgaccccgaccatcgaaaaggacgacctgcaggaggccatcctctggtggatcgtatatctctatcttttcctgttgctgacgatcctgctggtcaacgtgctggtgcttcatcgtaccctgcggccgctctatgccctgctgcgatggttcgacagttataccgtgggcgggaagaacgccccgctggtgaacgacacgaaggtcatcgagttccggcggctgaacgaggcggcgaaccgttatgccgagcgggcggagtccctgttcgaacgccagaaacaattcatcggcaatgcctcgcatgagatgcagaccccgctggccatttgccgcaaccggctggaaatgctcgtggacgacggttcggcgttgaccgaggcgcagctcggcgaaattctgaaggtgcaggggacgctggactacctcgtgcggctcaaccgctcgctgctgctgctttcgaagatcgagaacgggcagttccccgagacggaacaggtcgatttcaacgcccaggtgcggcgcacggccgaggatatggaggagatctacgccgggcgcgaaatgcgtttcgaactgcatgagcaggggcacctgtcggcgcggatgaatccgtcgctggcggccagcctggtgtcgaacctgctgaaaaacgcctatgtccacggtgacaggggcgggacggtgtcggtcactgttgccccgcatgaactgcgcgtctgcaacagcggcggcgggggcgcactcgacgcggagcatatcttcgagcgcttttaccaggggacgaagaaggagggctcgacggggctcggcctctcgatcgtcgacgccgtgtgccgcctttacgggctgcgcgtgggatactcctatataaataggtgtcactgtttctcggtgcatttccggatataaaaaaacgaaaaaaaacggatcggggccgattatttcaaattcgtttcagctttgggtcgcaactttgcactgtgaatataagtcaaacctaatattgaaacgattatgaaaaagctcatgatgattctcgcaggcacagccctgattgcaacttccgcccccgcattcgcgggcaacgaccgtccgatcgcagtcggcgaacttccggccccggcacagcaatttatcaagacgcatttcggcggcatcgaggtcgccttgtccaaagtggacgaggaactttttgacaaggactacaaggtggtgttcgtcaacggcgcgaaggtcgaattcacgaagaacggcgagtggaaagatgtcgaatgcaaatacggcgaggtgccggccgccatcgtgccgcagcagatccgcgactatgtcgccaagaactatcccgaccgcaaggtcacggcgatcgaccgcgaccgccgcgactatgaagttgaactggacaacggcctcgacctgaaattcgacctgaaattccgtctgatagacatcgacgattaatcccggtattaaccttaaattcggaatcgtatgaagaaattcacggtattggtaatgggactcgtgtcgctgggtgcgatggcgggttgtgaagacgacgataggaaatcggtaagggtgccggccgccgtgcagggtgctttcgggaaaatgttccccgctgcgagccatgtcgaatgggaagacaggggcggatatgtagtcgccgatttccgcagcgcgggcacggtcatgcaggcatggttcgatgccgccggcaaatggcacatgaccgaggaggacatctcctatgccgagctgccccaggcggtgcgtacagcctacgaggccggcgattatgccgcctggcatgtggacgacgtggacaagttgcagcgcaacggccaggagacggtctacgtgatcgaagtcgaacacgccaagcaggaattcgacctctattattccgaagacggcgtgctgttgcgcgaggcggccgatacggacggcaacggcgaccacggcgatatgctcccgcaggaactgccgaaggcagtcagcgatttcatcgcccggaaataccccggtgcccgtatcatcgacgcggagcgggagaagggaaataccgaggtcgatatcatcttcgccgggaaagcgctcgaagtgtgcttcggtacgggcgacgcctggctgtggacgaagaccgagttgcgtctttcggagattccggatgtggtgaggcgggctttgcagtcatcgcagtacggcacgtgggagatcgacgatgccgacctctacgaaagccccgaccgcgtatggtacgccttcgacatggaagacccgcgatccgaacgggaggcgacggtgcgtatcctcggggacggcaccctgctctgatcgtcccgcatatttgtacggagcctgcatccctgggtgcgggccccgttttttttgttataacatagagctatatcgttataaaataatatgatgtgtttttcgtacaaattagtagaaactattgtatatttgtattaggaaaagaaaatacaaacacaaacttaaaacaatattactatgttaagcaagaaattacatgacgcactgaatgcgcagatcaacgccgagctgtggtcggcctatctttatctttcgatgtcgatggacgccgagaacaaggggctgaaaggtgtggccaactggtttttcgtccagttccgcgaggagcaggatcatgcccgcatcctgatgaactacatcaattcgcgcgatgccaaggtcgtgctgaagccgatcgaggaggtgcgtaccgagtggacgtcgccgctcgatatgttcaaggacacgctggagcatgagaaggtggtgacttcgatgatcaacaacctggcagccatcgctgccgaagataaggatttcgcatcgtcgaacatgctcgtatggttcgtcgacgagcaggtcgaggaggaggagtcggcacgcgacatgattaccgcctgtgaggctgtagagggtaacaagttcgggctttatacgctcgacaaggaactggcggcccgcgtttaccagcaggcttcgccgcttgccacggcaaccgaataattcgcagcgaacctgattgctgagtctgccgccccggtttcccggggcggctgcttttgccgggtgacccggcagcctgcgcatccgggccggatggcgggggcagttccggggaagctattggggagaagctattccggaggggctattgagaggcatgataccggggaaagcgattccggggtatcgggcgaggtgtcgggcaggggcgattcccgggggagattgcggggctgatatgggagcgagttaccgcatgccggaaccgtaccggccgggaaggaggcgcgggaatggccttgtgaagagggccgggagcgggatgtgggaaaacaagggccggatgccggagcgcctgcagggcggatagggggggctcacctcatcgctttgccttgtagtcgatcccggccttgcgggcctgcgaatgctggtacgggcggcggatgcggtaaaggcgcccgtctttgacaagccgtgcgccggtttggtggaaaacgaaggggatgtctgccgcgacgcattggcggcggatcgaaagtacccagtcgtaattgcaggggcgggcttcgttgcccgattcgcccccgacggaaacctcttcgattccggggacgaggtatcgtgcgatgtcgagcggcccgagcagcggggcgcagatgaccagcttgtggcgcaggggggcgtccagcagaaaaggcagccggtagtcggccattgcctggttctcgaccgtgcagcccacggcgaggttttcgtagcctccgccccagtcgggcggcaatacctgcatgaggcggtcgatacgcttggtgatgaagaaaaagcgcaggtcgctgcgtatgcggatcatctcccacgcttcggcgcgccatgcgtcggcctcctcgacgaggaaatcggacgtgaagcaggtgtagaccatctcgccgggcgggactttgtagcgtccgtcgcgcgtgcggcgcacggggaggttaaaggccgttgtcctgcgtacctcgcggctgtccttgtcgtgctgcgcatcctgccggtagacgtagcagtgccggcagccttcgctgagcttgcggcatccgtgccacgggttccaactgaccgacataacctgttatttgagttccatgcgcaggcgcaccatgtggcggcactcgacgccgttttcgaaaaacggaacggggtagtgtttgctgaaatagtccacgtcgacgccgcagcggacgaacccgcagcgttcgtagagcgcaatctgtcccacgcccagatcgcccgtaccgatttcgagaagatggaacccggccgcacgggccgtggcgacggcgtggcggagcatggccgtggcgatgcccttgcgctggtgttcggggacgacggcgatattgaccacttcggccgtgaacggccgcgtgtgcaggaatacatactggccgaggatttccccgtcgcgacgtgcgacataggttgtgccgcggtcggcgtagtcggctacggactcttccgattcgtcggccagcagcagcaggtcgcgctgcggcgtgtctgtctttacaatttcgagatccatgtcagaaaagcgatgcggcgccttcgaaggtcgccagtacgacgatataacgcagggtcttgcccgcgagcatcgagccgcccgtgagccagacgttgctgcgcatcagccccagcacgatggcgatggcctcgccgatcgtgggcaggaatgcgaagaaggccatcagcgccccgcgcccggagaggaacctgcgcgcccgtgccagctgtttttcgctcacgcccagccgggtgacccactcgctttttcccagcgtgccgatccagtagcagctcatgccgcccagcgtgttgcccagcgatgcggctgcgacgcacaataccgggtcgagccccatgtgcacgagcacgatcatcacggcttcggagctgaacgggaggatgctcccggcgatgaatgccgagaagaaaagtccccaatagccccagtcggccagtatttgcgaaagcgattccatgccttggtgtccgattttgtgcaagagtagtctgcctgcgggacaaagatagcttttttgcccgaatgggtttgcaggagccctgcaaaatgcgctaattttgtctgaaacgtaaatctgaccgcttatgcttaaatcgagactttgtatcgcttttttcgcttttgccgtggggtgcgcccctgcgcagaagccgcttaccgactatgtgaaccccatgctggggacggcgacgctgtgggacagcgtcgacctgggattcaaacccaccaaacggacatggggcgccgaggtcttccccggatcgtcgctgcccaacgccatggtgcaggtcagccccgtcaccaagttccacagcggtgcggggtaccagtatgaagattccgtgatctacggctttacgcacaccaacaaggggcactggaacctttgccatattcccctgctgcctgtgacggggacgcccacgccgggtgactactgctcgccgttcagccacgagcgcgagtcggccgccccggggtattaccaggtattcctcgaccgttacggcgtcgatgcacagctcagctcgacgctgcgctgtgcattccataaatatacctatcccgcgggtgccgcgcccgccgtgctggcagacctgcagcgttcgaacgagcatgtgcgtgcgtgggatatccgcaaggagggcgacaacgtgttcgccggctggcagcagaccggcgagaagatgtatttctacgccgtggcgaaccgtcccgtgaccgggatagagcccgtcgtcgagggcgaccgcgaggtgcgcatcgtgcgtttcggcgagggtgacggggcactggagctccggatcgggttctcgttcgtgagcgagaagaacgcccgcgagaacctcgaggccgagatgctcggcaagagcttcgccgaggtgcgctccgaggctacggcgacgtggaacgacctgttggggcggatccgcgtcgaaggcggcacggagcgggaaaaggggctgttctattcgagcctctaccgttcgttcctctggccggcgctgcgcagcgacgtgaacggtgagttcaccgatgtcgacggaaaggtcatcaatcccggtttccgttactatacgggcccgtcgtattgggacgactaccgcaataagctgatcctgctggggatgctggctcccgatgtggcggccgacgtcatcagctccgatgtcgacaagggcgagaaacggggcgggttcatgcccacgttcttccacggcgaccacgcttcggcgttcgtggccgggacatacctgcgcggcaaccgcggcttcgacgtcaaccgtgcctacaacctcgtgctgcgcaacgctacggtacagggcccgagccgcccctggctcgacgagtatgtcgccaaggggtacatttcggaaatggacgtcgagaaccccgtgacgtggacggtctgcaaggccgccgtcaccaagacgctggagtacagctacgacgactatgcggtcgccctgctggccgatgcgctgggcgataaggagaaccgcgacatgctgatgaagcgcacgtcgaactacaagaacctcttcgacccctcgacggggctgatgcgcgggcgcctcgaaaacggcgagtggatcacgcccttcgacgaccagtatccctactatgaatatatgtaccgcgaggcgaatgcctggcagcaggcgttcttcgcaccgcacgataccgaggggttgatcggcctcttcccgagccgcgaggcgttcggcgaacagctggacaaactcttctcgattccgtggaaaggatacgaagtggacaacctctcgtgcttcatcggccagtactgccacggcaaccagcccgaccacagtttcccgtacctctattatttcatcggtcgccaggagcgttcgcaggagttgttggattacattctcgaccgcttctacggtatggggccggaagggctggcgctgtgcggtatggacgatgcgggcgagatgtcgtcgtggtacgtgttcaatgccatcggcctttacacctattcgccggccgaccccgaatatatcgtgaccgtgccgctgttcgacaaggtgcaggtcgcgctgggcgacggcaaccgctggacgatccgccacgacggtcaggggcgtaagatcacgggcatcacctgcggcggcaagcccgtcgacggttggttcgtgtcgcacgatgcgctgaacaagggcgaactggtgatttcgacctccgaagaataacggcgcaggggtgcgggggtaaccccgcgcccttcgcctacctcggacgggagtttcggatgccggccggaaggtgccggaagatacctgggccgggaaggtgcagccgggtgtccgggcccgggaggatcgttgcatgaagcggcggcaggggtattcctgccgccgcttcatgtcgtttctatggggttggggcgttgctggggtttggcggggagcccggctgctgctccggccgtgcgggtcaggatttttcagcccggctgaggatggcagggctttgtacgtgcacgccgaattgggcggctttggcgagtatgcgccgcgccagtgcggctttcttcgcgtcgggtgcatagcggaaataggcttccgccgcgcggacgtgctcggcgtcgacgagcgggaattcgcgcgtttcggggatgccgaatgccgaatcgggaagttcgtgccgctctgcagcggtgaggcggtcgtcggtgtgtgtggccatggtttttcctgttttggttttatgcgtggatacgcaaattcccggccagcgtgtctgcccccccccacctgcggcgggattcgcggtttacccgatgatcgtggcgacgatgcggcggcctggggcgcggttgcggaactcgcagagataaatcccctgccaggtgccgaggttgagcctgccgcgggtgacgggaacggtgagttcgacgcccgtgagcgtcgatttggcatgtgcgggcatgtcgtcgtcgccttcgagcgtatgggtgtagtagacctcgcgttcgcctaccagccggtcgaagatcgccccgaggtcgttacgcacgtcggggtcggcgttttcgttgatcgaaagccctgcggaggtgtgcttgacaaagaggtgtaccagtccggcgtcgggcagcggcgggaggtgggacagcacctcgtccgtaaccaggtggaacccgcggctgcgaggcgtgagggtgaattctgcttgctgaaccatggtggaatattgatgtacgtgtgcaaaggtacgaaaaattgcgggccgccgtgtcccgggaacgggtatatgttgccgccggggtcgggcatggtgcggcagcgggagattatgcatcgaaatattggaaaatccggtatttattttgatcttcgtagcactaaatgccgctatcatgtccgctatcctgaatttcctgttcccggggaaaccccgggattcccgcagctcgtggctgttgcttgctgcgcgtgtcgttttcggcctgctgctgatgtcgcacggcatcgccaagttgcagaacttcgaggcgctctcggcgacgttccccgatccgctgggtgtcgggagccggatgtcgctcgtgctggccgttttcggggaggtcgtctgcgcggccgggtgtgtggccgggttactctaccggctggcgctcatcccgatgatctttacgatgtgtgtggctttctttgcggtacacggcggcgatccctttgccgcacgtgagccggcgctggtttacctggttgtcttcgtcctgatgtacgcagccggccccgggcgctacgccgtcgatacgctcattgcacaacggatccgtgcgccgaagcgttagccccggttcttgccgagggtggggaggatagtaggggtgtcgtgaacccgtttcgtccccggcttccggccaggcggccgccgcatggaaacgatgaaggcagatgccttttatcatctgccctcagctttttgcggtcatagacctttttcgacttgtgtacccggctgaaattgaccgggcggtcgtgattcccgatctcggcctcacggcttgccctgcggttggccttgaggtaatcacgcagtccgttcgtctttgttttcatcactacatcggttttacgggggcaaagataatcggaatattttaagggggagcgccctgaggctaatttcccgctccggtgccgtattatgcctgctgcaggtcggcgaaccaataggaatagctcttttccgacccgtcgtcaaggcggatgcggtaacttcggcgcaaaggcgtgccgagccggaacgggacgggggtgcggaagatcggcccgtcgtagcagaatgtgtggtattcgccgttttcgccgttgggatcgacgcccgcaggcagcgaggcgatgaatgcggggtctatctcgcgcccgacggcgtcggcgtcaaggctgtcggccatcgtggtgacgatgaccgtcctgagccccgagacaaggaagtcgtgcatcacgtcgccggaggattttccccagagcggttccgcgatcccgatgccatggggtgcgagtttctgctcgcggtatttgcgtacgtcgtgcaggaagatgtccccgaagatgaaacaggttacgccctgcgccttgaaatgctccacggcacgggacatggcagccccgtagtcctccatattgcctttcgggctgaggtcgacgatgtgcagggggatgccgatactgtcggcctgtgcctgcagcagggcggtcgggatgccgtgcatggtcgaacggtgcgtgtctcggtttacggtcgtcagcaatgcgacgatttcgtatttgcccgactgcatcgcccgcagcagggcatgggcggagtccttgccgccgctccagttgaaaaccgcctttatccgttccatgtcacatgtccggcgttgtggaagaatccgcagacgagggtcaggtattcgggcaatttgccgtccgtgccccatttcaggtcgatgccgaagagctcggcggtagttttgccgatgtcgaatccgcaggcttcgagcgacgggcgcaccagttcggggtgtcggcagggctttccgtcgggacgtgtgcaggtgccttcggggcagtggaggcatgtcccgacgtaggcgaacgataggccgccgtactgccgttccatcccgagcaattgctgttcgaggcgtctgcgttcgggcaggatcagccgtccggcttccgaaaaggggagcccctgcttttgcggaacgattttcgtgacggtgagcagtgccgtggcgtagccggaaaggtacctcccgacgctgaatccgaaaggggggcatccccagctgcgcccgtaattggggcaggcgaggcagtagcccccgatccgttcggcatcgcggaaacgggcgatgtaatcggcagcgggaagttccgccgaaaaatcccgggccgtatatggaagcgaaatatccacgtggtaaaaatagcggttttaccgtgccgtggtgccggtttgtgaaaataatccggatttccggacaatttttcggaataatccgctatatttgcttcagatttggttctccgctccccgtcgcgggagggtgtgaaaagggaatcgggtgtaaatcccggacagtcccgctgctgtgaagccccgtgacgttccgaatatctcagccactgccccgcggggcgggaaggcttcgggacaggggtcagtcagaagacctgccagatcgattcgttgtcggaaagccccgcggactgggcgtctggtttcggtcgtatgatgctttgggattttatgcaatcggcgttttgcagggattactgtcctgtttttcgatgcaaggttcaggcgcgcggccgggcggaacccggacgtattcctgcaagccgtgcggcggaaattttgagaattgacaaaccggaaaggcatggtaatatggaacacgatgctgtaatgaattttgggatgcggccatgtcttttgtaaataacgatggttatgaatatcgtactgtatggagtatcggcggaaatcgccgggaaaatcgccgggaaatacggcctcaaactgataagtacacccgataagttccagccttcgggaaccgtggtgctggtgccgccgatgggcaccccgcggcagttgctcgccttctacaatgccatgctgcgccatgaggacgacgtcgatgcggtgatcgtctgcggtatcgaatcctgcgaggcggccagcacggtgcagtattgcacgcccccggggaaattcttctcgctgggcggtgacctcgaacccgaagaactggagtcggagttgtacgtgatcctcgattccctgtttgcggaaggcaaccagatcaatttctaagtcccgggggcaggtatcgccgcagttgcggtgcaccgttcccggccggcataatccgggattatatcctcccgtgcgcgggcggaactgttgcgtatttctgcgtgccgggccgtttggggtatgggtgtcctgaggtcggtgcggggcgccgcatggggttatacccgcgtgcagcgtcgtgcgaccgcggtgcccggcatgtctgctgtgggcattattttcatgatgccagaattttatttccccacacagtgctttgaaaagatgtgtttgagcacctcttcggaggctaacgcattgcgtcccgtgacactgccgacatggtggatgacctggcggatttcttcgctcagcaggtcggtctgaaggccgctgccgagcccgtcgagggcccggcggagcgcatcgcctgcggccgtgagggcttcgtaatggcggttgttcgaaacgattgcgtcgccgtggtagagggcttccgtatctacaaaggagcgcaatatccggcgcaggcggtctatgccgtcgccgttgcgggccgaaatgccgatcgtgccttcgggcagggggctgtccggtgccgtatccgttttatttaccagcaccagcagtttctggtcggcgcggagcgggaattccggggcaacgggcgcacctgcggcaaggcgtgccgcatcggtcatgtaaatcacgatctgcgcccgctcgatgctcgacatcgtgcgctggatgcccatctgttccagccggtcgtccgttgcgcggatacccgccgtgtcgaggaaccggaagacgaccccgtcgatgttgatccgctcctcgatgacgtcgcgcgtcgtgccggcgatgtcggaaaccaggacgcgctcttcgttgagcaggcggttgagcagtgtgctcttgccgacgttcggggctcccgtgatcgctacggcgaccccctccttgatggcattcccaagcgtgaacgaattgcgcagggcgtcgatatgcgccccgatccgctgcatcgcctcccgcagttgcgcgcggtcggcgaattcgacctcttcttccgaaaagtcgagttccagttcgaggagcgcagtgagttccagcagctttgcgcacagtccttccagcgcgtcggaataacctccccgcatctggttcgcggcgagcgcatgggccgcgcgcgacgatgaagcgatgatgtcggccacggcctcggcctgtgataggtctaacttgccggcgaggtaggcgcggatggtgaattcacccggcccggccatgcgggcgccggagacggtgagcagccgcaggatctcggaaacgatgtattgcgatccgtggcaggatatctcggcggcatcctcgccggtataggagcggggtgcacggaataccgtgaccagcacgtcgtccaatacgcggccctcgtccacgatttccccgtagtgtaccgtgtagcctgctgctgcggccagcggttcccggccgcggaagatacggtcgcagatgcgcaacgcctcctccccgctgatgcggatgacggctaatgcccctcctgcggcagttgccggggcggcgatggtatcgtgatcccggatcatgttatcttccttcgatgcggattcgctgtcccagacggagtttatgggcgtttttgatgccgttccagcgcatcagctgcgctgtggtcacgcggtagcggcgggcgatggcgcccagcgtatcgcccttcttgaccacgtagaccgtacccgagcgttcctggcgtttcttgtcgatgttcgccgggttgatgtactccttgaggtaggccgagtctttggcgaagatcgcaggttcgttggcgatgtattgcgtgatgttgcgctgcggcagcacgagcgtatagggcttggtcgtggccgggatgatatcgagtttgtattgcgggttgagctgccgcagggtctcgatcgggatgtcgatcgtcgaggcgatctgcccgaggtgcatcagccggtcgatgcggatggtatccgtggccagcgggatcggggcttcggtgagttcgatgccgtgctggcggtgataggcataggcgtacgaggcgccgatgaatgcggggacgtagccgcgcgtttcgcggggcaggtagtcgtagatgtcccagaatgtgcgcccgttgccgccggagcgggctattgccttgttgacgttgcccgggccgcagttgtaggcggcgatggccagcgaccagtcgttatagatggcatagaggtctttcaggtagcggcaggcggcctgtgtcgaacggacagggtcgcggcgttcgtcgaccagcgagttgacttccagtccgtagcttttgcccgtcgagggcatgaactgccacaggcctacggcgcccatcggcgacacggccgtggtggaaagcgccgattcgatgatcggcagtgcccgcagttcgacggggagcccctccttgagcagttcgtcctcgatgagcgggaaatagtactgcgacatgcccaggatgcggctgatcgtgccgtagcgcgaatcggtgtagcggttgatataaccccgtacgatgttgttgtaaggcaactggatcggcgaaacgagcgcccgcagccgctggatgtagaccgaatcgggagtcgtgctttcggccgtgctgtcgaccaggatgtagttgtcgaaaaattcctggtaggaatccccgcattgccgttcgcgccacacggcgaccagcgaatcggcctgttctgccgaaagtccgagcgtcatgtcgtcgtactgcacctcggcggggtcgggaagttcgggctcctccggctcgggagcggcttgctgctcggccacgggggcggtcgggggcgttacgacggcttcggtcttgtttttcttcttgtcttttttgcgggggcggcggtcgagtgccgaggccgggacggcgactgccagtagcagcagtatggtcaggagggttctcatcggttagaatttgatgctcatgttgaagccgaataccgggcggttgccgccgagcgagggcacgtaggtgtagtcgaccatcggttcgaggttcatcgtcaggtcgtccgagatgtcgtagtccttgaggtgggcgtcgacgtgggcatcgacgatctgcaatacgtacaggcccgcggagatgatgatgcacaggtcgcggttgcgccggaagttattgcgcaggttgcggatataatccgccgaatagcggccgtggaattcgtcggtggggccgtccggatatttatcggggttttgttcgtagtcgctcagcagcctgtaggccttcttgaaacgctggtagccgcggttgttccagtcgatgcagtagatcatcgccgcgaaaccgccgaccacgaaggggactttccagtaacttttgttgtagatctgccccgcgccggggaagatgcaggccagcgtcgtggccttcttgacgttcgacacatcgttggtcgagtagtttaccgccgcatcgccgatgaaatagatgtacgaggcgacggtcaaccccaggtagacctggcggcgggtgttgctgcggatcatcttggcctgcagtgcgtccagttcgggcgtacgcgtgaggtttttgtcggtataggcgtcatactcgcgcttgagcggcttgtatgtcctgttttcgttgatgtagagcgccagccccgctcccaccgtaccgtagagtatgggcagcttccagtattgtttgttgtatatctgtccgtagccgggcagaacggtcgagatccagcagaccttcgaaagcgacatcgagtcactcatgagccagcctttcttgtgccgcatggaatccggttcggtcttgatgccggccagcctgagctgcatgagcgagtccgtggcgcggatgtcgtccgtgcgcaatgccgtcacggcgagcgaatcggccgtgaagtccagtgccatgagcgagtcgagttcgcgcgcgagggcgttgttggccagcgaatcgctcttgtggcgcagcgaatccggcttgacgaacatgccgccgcgtacgatggtgcgcgccccgcggtggagctgtgcctcggcggggagccacaacatgagcgccgcgagcatcggcagcaggtgtctgaaccggatacttcccatattatttaatgcgtcccgaaaaccgttcgatgaactgttcgatatccttgtcgtcgccgaacccgatgacgatgcgtccgccgccgttcttcgagcgcttgatgctgatgtcctgcgagaagaacttttcgagttgctccaccagccgcgaatagctttcgggatactcctcgtcctccacattctgtgccgctgcggccggttgttcggtgagcgagcgtaccagctcctcggcctggcgtaccgaaaggcctttcttgatgatgcgtttgagcacgcgtacctgcaccccgtcgggggcgccggcgatggctttggcgtgccccatcgagatgagcccctccttgagcgccagctgcacctcgtcgggcagcttgagcagccgcatgtagttcgagatggtcgagcgtttcttgcccaccttttccgagagggcgtcctgcgtcaggttgcactcgtcgatcaggcgctgcattccgagcgcgatctctatggcattgagatcctgacgctggatgttctccaccagggccatggcgtgcaggttctcgtcgtccacctcgcggatataggccgggaggctcgtcaggtcggcgcgctgcgccgcacgccagcggcgttcaccgctgatgatgatatattttccgtcgccggatttcttgaccgtgatgggctggatgacccccagctggcggatcgagtcggccagttcgtcgagcgcctcctcgtcgaactgcgtacgcggctgcgtggggttgggaatgatctccgtgatgtcgatctcggacatctggctcatcggcttgagcttggcgtcgacggcgtcggtgccgaatatggcgtccagtccgcgccctaatcccttcggttgtttcatttcggtatgttattttctcggtttgcggttgcgcttgaggaattcccgggccagcgtgagatagttctccgagccgacggcgcccgcgtcgtaaagcatgacgggctttccgtgcgagggtgcttctcccaaacggatattgcgctgaattattgtgtcgtaagccaacggcccgaaatgttcgcgcacctcgttcacgacctggttgttcaggcggttgcgcatatacatcgtcagcaggaaaccctcgatgtcgagcgccgggttgaggccgctcttgaccttgcggatggtgttcagcagcttcgaaagcccttcgagggcgaggtattcgcactgcacgggaatgagcaccgtgtcggcggccgtgaggatattgacggtggtataacccagcgaaggggagcagtcgatgaaaatgtagtcgaacctttcgcgcacggcgtccacgatgcgcttcatcacatggtgggcgtcctccagcttgggcagctcggtgtcggctgctaccaggtctatcgacgacggcagcagccacaggttcttcacgtcggggctttgcaggataacctcctcgggcttcctgaggccggcgatacactcgtagatgccttcgaggtttatgtcgaagcccagtccggaggtggcgttggcctgcgggtcggcgtcgagcagcagcaccttcttgcccagtagggccagcgatgccgcgaggttgatggccgttgtggtcttgcccacgccgcctttctgattcgctaaagcgataacctttgccatgtttcaatcgggtttataatcgggcaaatttaatgatttaaaatggaaatccataaccgtaaccgaaatttgcttatcttttcggaaaatgggctgcgcccctgccggagcaaataaatttgcttttgcccttgacttgcactatctttggactcggaacgaattgatagtaacagcctattatgacagaaaaaaaacagggggctcccgttcgggaacccatgcccgccggagagcctgcgaaggcggcgggcaataaggcggacaataataagatatggcactacaacggaaaattccccgtggtggtggactacctggttttcttcggcatcttcctgctggcgcagggcctgggaactgccgtggcatggctggcggggtgcaaatggcccgatccggagctgctggccagccccgacgaggcgataagcacggcggagcagatcgccgccgggcatttcaatgccgtgacctatttcgtgtcgatgtccgtgacgctcgcgggattcctcttctaccgcaggcggaggcacggccctgcggtcgtggcgcgtttctcccggcgcgggctgaatcccgtgctgctgctctggggggtgttcttcatgctctcgacctcggtcgtgctggagccgttgctgagcctgatgcccgaggtgccgaacgtctacgggcgcggggcgtgggcgatcgtgacggtcgtggtgatggccccgcttttcgaggaggtgatcttccgcggcgtgctgctcgaatcgacgcgcgcacggtacggcgtggtggccgcatggctgctctcgtcggccatcttcggcatcgtgcatgtccatcccacagtggtggtgaacgcctttgtcatgggcctggtgctggccttcatctatctgcgcaccgattcgctctggtctgcgatcatactccatgcggtcaacaacggcattgcctacctggcgctgattgccgggcacggtaattccatgctcatcgacatggtcggtagccggacgctctacgtgctgttgtatatcgcggcgctggccgtcttcgccgtttcgggttacatgatgctcgtgtcgctgcgccgtctgaaggccgaggagaaaaatcgcggcgcggcgtaataatctcggcagaggctgcgttagttacgagtaaaaacagtatctttgtcctccggattatgactttgcgaacgaaaatagcggtcgtggcggctacgttgttcctggccggttgccaggaactgcccggctattttgccagcgataccacactggcgcgggcgggcggcagcgaactgaagatgcgcgatgtcgagtcggtagtcccgaagggggttacgggcgaggacagcgcggccttcatgaaggtctatgtcgaccgctgggtgcgcaaacagctcaaattgcaggaggccgagatccttttttccgcttcggcggacgatatcgacaagatggtcgaggagtaccggcaggcgctgctgatccgcaagctggatcagcattacgtcgaccgcagcatcgacacgaccttcacggagaacgagatcgcggcctattacaacgcgcacaaggccgatttccggctcgaccgtacgttggtcaagggacggatcgtgcagttcggcgaagggtaccgccaggcgcgcaaattgcgggagctgatgggggcgaagagcgaagcccggcagcaggatttccgggacatatgcgcgaagaacgactttacggttaccgatttcagcgatcagtgggtggatttcccggaattcctgagtttcctgcccacgctccggtcgcagaactacgacccggtgctcgcaacgacggccgtgcaggagatgcgcgacagccattcgcactactatttccagatcgacgccgtgcgccgcgagggggagcccatcccgctcgaacggctgcgggggacgatccgccgcatcctcttcaaccagcgccagagcgagatcatccgcagccacgaggaggaactctataaccgtgcgtgcgaaggcgggagcataaagattttcgaaaacgagaatacaaacgataaagaaaaagaataatgttgaaaaaaggtatgctgggggcggctttcgccctgctcgttgccggggcgttcgcgcagaagcagcaggtgatgctcgacaaggtggtcgccgtcgtagggtcttcgtccatcctccattccgaagtggcggagtatgcccggcagctcacggcccagcgccgtgccgaaggatatacctccgaccgtgacccgatgaacgaggcgctcgaggcactgatgacccagaagctgctcttcaaccaggcgcagatcgactcggtgaagatcaatgcgggcgacatcgccacgcatgtggaacagcagattcagaatatgatcgaaaccgaggggtcgatcccgaagctcgaggccaagcaccacatggccattttcagcatccgcgagaacatgcgccagcgctatgaggagcagtcgtatgcctcttccatgcagagcgaggttgtgagcaaggtgtcggtcattcccggcgaggtcgagcgtttctacaagtcgatcgacaaggacagcctgccgaccgtggccgaacaatatgtctacgcccagatcacccgtttccccaagtcgatcaccgaggccaagcagcgcacgcgcgagcgcctgctcgacatgcgcgaacggatcattaccggcaaggcgaaattcgagaacctggcacgcatgtattcgcaggatcccgggacgatgatgcgcggcggcgagatggatcccaccgagctcaacggactggaagcaccgttcgccgacgccctcgagaacatgaagccggggcagatatcggaggtcgtcgagacccgctacggacagcatatcatccagttgctcgacaagcgcggcagcctctaccatttccgccatatcctgctgcgcccggtctatacgatggacgagctcaacgaaggggtcgtgttcctggacagcatcgccaaccagatacgcaaggattccctctcgttcgacaaggccgccctccagttctccgacgacgccacgtcgaagatgaacggcggtatcgtctcgaaccacgacatcctggagcgtttcaatgccttcgaggcgaagctcaccgtgacgaagttcctgcgtgaggatttcgcgcacttcggtgcactggacgactacaatgccttgatccgcctcaaaccgggcgagatttcgcctgcattcctgaccgaggacatcatgggcaaccagctggccaagatcgtcaagctcgtggagatcattcccacgcatgtcgcatcgctcaacgaagactacctccggctggaggagatggcgctcaatgccaagcaggagcgggtgttcaaggagtggctgaccaagaagatcgacgccatgtacgtttacatcgaccccgaattccgcgacggggagttcgagaacaaaagttgggtgaaataaaccgtgcgcaggctctttaccatagctgccgtcgtgctggctgcgggcagtgtgattttcgcccgcagcgggatgcaggcacccggacaggagcccgaggccgagaagaaactcatcgacctgaagtcggacaacatgggccccatagcccccggcgactcggtgatcttcctggtcggcaatttcgccgcgcagcataacggcgctgtcattacgtgcgacagtgccgtgcgttattcggacatgcggatcgagttcttcggcaatgtcctcatcaacaagaatacgacctatatttacggcgaccgtgccgaatacaacggcgagctgaacgaggcgcgggtctattccgacatcgtcaaggtcgtcgacggcgatgccacgctctatacctaccggtttgttttcaacacgaaggagaatatcggccagttcgccgacggcggcgtactgataaaccgggacaaccggctcgaatcggtgcgcggctactattatgccaacaccaaagacctcatttgcgtagaccgcgtcgagatgcgtaacgacgaatacgaactcaagggcgactcggtggtctacaacatggccaccgacaacgcttttttcttcgagaataccaacatctggaacaaggacggcgactacctctatgccgaccggggcgcgtacgacaaggccgatacgctttaccgggtcacgcgcaacggttatgtgctgaccgagaaacaggagatgtggagcgacagcatcgactatttccgcgccaaagaccacgtggtgctgtggcgggacatccagatcgacgatacggagcacaaggtgctcgccttcggcgattacggcgagtattggaaggagccgggcgatgtattcctcacgcggcgcccctcggtggtgagctacgaccttacgcagggcgattcgctcttcatgcgtgccgactcgatgttcctctttacggtcaacgagaatgcccggcgccgggctgcggagaaggccgcggccgattcgcttgcgcgtatgagggccgattccctgcaacggcccgattcgctggggcagcatcccgatggatcggccgtcacggccggccccgagggcggacgtattgtgcccgggctgcgtcccggcagtgcagccgattcgctttcgtcggccggtggaacggattcgctcgccgcagcttccggccccgattcgccggcgcatggttcgtcgggggcggattcgctgcacatggccgattcgctctccgcgccgggcagcctgcccgactcgctggacagggctgcagatacgctgaccgttgcccagcgcaaggccctgctcaaggaagcggcgcgcaaggccaaggccgaaaagaaggccgcggcagccaaaatcaagaaggcgcagctcgattcgatagccgtcagacgtaaggagaaggccacggccaaactgctgtcgcaaaaggagcgcgaggaggcgcgtctggccgcccggaggctgaaggctgcggcgaaactcaaagcccggcaggcgcgtgccgcccgcaagggaaaggtgatcccggtcgattcggcggccctgcgcgaactggattcgctcatcgagatgaacatggccgaacaggattcgctgctcaacctgctggccgattcgctgttggctgacacgggggcgatggcgctcccggccgattcggtcgactcgctcgccctgccgcgcgacagcatctaccgcctgatgaaaggttaccgcgacgtgaggatcttcaggtcggatttccagaccgtgtgcgactcgatcgtggcgatcagcaccgattcgacgatccacctctatattgaccccgtgttgtggaaccagagcaaccagatcacttcggacgtaatggatatttttaccgagcggcaacagatcaaacgcgccgaattcatcggcagtccgatgatggtcagccagctcgatacgacacattacaatcaggtggcgggcaagaccatgaccgcctacttctacaacaaccagatataccgcaacgacgtcaacggcaatgcccagaccatctattacatgcaggacggcgagccgcccgagatcacgatgatgggcgttatcgagagcggcgactgctcgttctatatcgaggacaagcaggtggtgcagatcgtctaccgcaacgaaatcaccgatgccttctatccgatggacaagattccgcccacgcaggagctctacctgaaaggcttcaaatgggagggcgcgcggaggcctgcgcaggccgacgtgttcgaccgcaggatacgcccctcgcagcgggcggcgcgttcgcaaatgcggcatcccgatttcccgatcatgatgcgcatcgaggagcataagaaacgcctgatcgaacagcgccgctgggccgatcgcaacgaccaggtcgacccgctcaccgtcgagtggatgcgcgaactgggatacgaggtcgggcagccgcgcgagccgcaacgccccgcgccgcaggccgaataaccggcgccgcaactctctgccggtaattcggatggtctatgcaaccatacggaaaccgtaacaaaaggcgaaaagcgaaaaacttttcgccttttgtgttatttttgcagccggttattcgtcagttggttttacatatgaaaaaaagtctgattgcactggcattcgggacacttgccctgggaatgtcggagttcgtgatgatgggcatcctgcccgatatcgcccgcagcctcggggtttccatccccgaggccgggcatcttatttcggcctatgccctgggcgtttgcttcggggcgccgcttacggtgctggtagcccggacgcgtccgctcaaacagatactgctggtgctcacggccctgatcgccgtcgggaacctgtgcgcgtcgctggcgccgaattactggatgctgatggcgatgcgctttgtgtccggcctgccgcacggcgcctttttcggtgtcgggtcgatcgtcgcagagcgggtggcggatgcggggaagcgcacggaagccgtttcgatcatgatcgtcggcatgaccgtcgccaacctgttcggcgtgccgctgggtacctatatcagcaatgtgctgtcatggcgcacgacctttgcgatcgtcgccgtatggggcgtggtggcgctgacgctcgtaaggatgtgggtgccccgcatggagccgctgcccgatacggggctgaaagggcagttccggttcctgcgcagccttgcgccctggctcgtgctggcatcggtgatgctcggcaacggcgggatcttctgctggtacagctatgtcagcccgctgatgatccacacctcgggtttcacggaggagaaccttacgctggttatcatgctggccggtttcggcatgttcgcaggcaatatcctcggcgggcatctctccgaccgttttacgcccgagaaggtcgtgcgttttacgctggccgcggccaccctgacgctgctcgggattttcttcggggcacatgtccactacctttccgtcgtgctgatgacgctctgcacgggttgtctgttttgtgtctcgtcgccgcagcagttgctgatcctggagaattcgcgcggcggtgagatgctcggcgcagccctcgtgcaggtggccttcaacctgggcaatgcgctgggcgcctactgcgggggcctgccgatcgcccgcgggctgggctatgaatatacggcgttgcccggtgcggggttcaccctgttggggttgctgacggccgtggtttatatccgtaaatatccccgccatgcgatgcgataacggtgcggagctgtttccggtggtcgacgaggccgggaacgtggtcgggtcggcgacacgtgccgaatgccacggcgggggtgggctgctgcatcccgtggtgcacctgcacctgttcaattcgcggggcgagttgtacctgcagcggcgccccgtgtggaaggatatccagcccgggcgctgggatacggccgtgggcgggcatgtcgactacggcgagacggtggacgacgcgttgcggcgcgaggtgcgcgaagaactcggcgtgacgggtttcgtgcccgaacgcgtggcggtgtacgtgttccgctcggagcgcgagcgcgaattgatctatgtccaccgcacggtgtacgacggggaggtcgtcccgagtgacgagctcgacggagggcgtttctggagccgggacgaaatcctggcgaacctgggcaagggagtattcacgcccaatttggagggcgaggtgaagctggtgctcggggtataattttttttcgtatatttgtaaccgggaaactgactatgaagcgactgccctgcatacagcagggtattatccggcactggccggtgcgagccgtggggattgacgccgatccggaaacgcatgtcttgcgatgatgcctgccgccgggctttcccagtcgccgttgtcgtcccgtagccggggtttccgccgctgataaccacgaaggccgtttccgacaggtctgaaatttgatagaaataccgtatgcagtctctccttacacattgggccgacgccctgctcgcatggctcgggctcacttccgcattgaataacggctgggatcgctgggtggctttctccctggtgctgctggctgtcgtgcttttcgatttcctgtgccgcacggtgctcgtgcacgggatgaggcgcatcgtgatgcgcaccaaagccacgtgggacgacgaactgttcagttccgccgtgctgagccggttgtgcaatatcgtcagcgccatcgtgctggtcatcgtccttcccgtagtcttcgacgaacagtcggaagccaggacgatcgtcacgcgcctggtgcaggtgtacatcgtcgttacggtcttccgttttatcaatgccctgctttatgcggctttcaacatcgtctcggcgcgtccagcgtggcaaaacaaaccgatcaacgggttgcgccagaccgggcaggggatcgcggcgctgatctgcggcatcctgatcgtctcgatcctgatcggcaagtcgcccgccatcctgcttacggggctgggcgcttcggcggccgtcatcatgctgattttccgcgacagtatcctcggcttcgtatccggcatccagctctcggcgaacgacatgctcaaggtgggggactggatcaccgtgcccaaatacggtgcggacggttcggtgatcgaggtgtcgctcacgaccgtgaaagtgcagaactgggacaatacgatcgttacgctgccgccttacctgctggtgagcgattcgttccagaactggcgcgggatgcaggcgtcgggcgggcgccgcgtgaagcgttcggtgaacctggacatgacgagcgtgaaattctgtacgcccgagatgctggcccgataccgcaacatagacatcatccgcgaatatatcgatcagaccgagcaacgggtcgaggagtacaacgccgcgcatggcatccgccccggcgaacgcaagatcaacggcctgcaccagaccaacctcggggtattccgtgcctatctggagcggtacctgcgcaacgaggtgcctgtcaacaaggggatgaccctgatggtgcgccagctgcaaccgacggagacgggattgccgatggaactctatttctttacggatacggtggtgtgggtggattacgaacgcatccagtcggatgtcttcgaccatgtgctggccgtcatccccgagttcgacctgagggtgttccaaaacccgtcgggaagcgatatcgaggcgctccgccacctgagggagccgggcgcaccggcgaaaccggcggttacaggaaaaccatcagcatcacctgaatgataatcacccgcaggaacatgcagagagggtagaccgtggcgtacgaaaccgacgggttgtcgccctcgatcgtgtcgttggcatagttcagtgccatcgggttggccatgctgccgcacaacatgccggcgaccgacccgaagtcgatgcgcaggatgcgcagggcgaagatgcccagcagtacgacggggacgaacgtcagcaggaatcccagcaacagccatagtgccccttcggggcgcatgaccgtctcgaagaagtgcgtgcccgcctcgagccccaggcatgcgaggtacatcgacaggcccagtgcccggagcatcaggttggcgctgtatgtggtgtaggtaatcatgtgcaggcgcgggccgaacgtgccgatcaggatgccgacgatgatcgggccgcctgccagaccgagctttacgggcaggctgatgcccgggatgcttacggggatgctcccgagcgtgagcccgaggatcaggccgacgaagactgccacgaggttgggctcttcgaggttcttcacggcattgccgagaatcttttccacatgcttgatcgcggcggcttcgcccacgaccgtcaggcggtcgcccatctgcaaacgcaggtcgggggtggccagcagttgtacgcccgagcggtagacgcggctgatgttgatgccgtaattgttgcgcaggcgcagcgaggagagtttcttgccgttgatttcggggcgcgtcacgaggatgcgctgcgaggtgagctggctgtcgacggcgttccagtcgatgttctccgtattccagtccgtctgttcctgctccccgaagatcaggcgcagtgcgtcggcctcgcccggggtggtgatcacgaggatgacgtcgtccttctgcaacgtcttgtcggaggtgggaatcgaaacctgcccttcgcgccagacccgcgaaatgacgaagtggtggtggctctgcgcagcgatctcgtggacgcttttgccgaagacggccgggttggtcaggtggtagctggcgatgaagacgtttttccggtgttcggcgtccggctccggcatgtcggcggggcggacgaagagtttgcggatgaagacgatggccaggatgacgcccactacacccagcggataagtcacggcgcagctcagggcggcgccgctggagtcgacacccatctgttgcagcgcctgctgcgcggcaccgagtgccggggtgttggtcgtggcgccgcacaggatgcccgacatgtcgggcatcgagacatgcagcgtatagctcattgccacggccagccccgtgccgagcaatactacggccagagccggcgacatcaggcgcagcccgtcagcgcgcagcgagttgaagaaaccggggccgacctgcaggccgagggcgtatacgaagatgatgagcccgaagctctcggcatagttcagcatcgccgggtcgatcgacagcccgaaatgcccggccaggataccggcgaaaaagatgaatgccacgcccagcgagatgccgaagatgcggatcctgcccagtgcgatcccgatcgtcgaaatgagcgaaataaccacgacggcctgcagagccgagtgttcgacgaataaacttttaagccattccatcctttccgtttgagaatttgctgcaaaagtagggcaaatttttcagatagccgcttttttgcagaaccttttgtgggctcattgtgcctgtgtgcaacattttcggccggcaaggtaaatcatttcagccccatgttatgacaaaacaggccccgaggtatgcagttcaggataatttacatatctttgcactaccctacttcacacaggggatggagggggtaattagtgacgcaaaagggcttctgtgccgggtgggagtctgaaaatcttacccggccgctgccggaaaactttagggattggttattccggacagcatcagggcggtcgataacggccgccctgatttgtttattgtgtacgatgtgttcacctctccggatcacagtttcagcggtcttccgcggtaaaaatccagtattttcgaacggaatacgaattcgtattttgcctgcacgagttccgactcggctttttccatgcgggttttggcatcgttgaaatcgaaaatggtcgaacgtcccgattccgccttccgctgctcgtaggcgaatgccaccttcgccgaggcgagggccacgccggccgaacggtatttgctgtacgccgcatcggcgttgtaccacgcctgttcgatctccttgcgcagcgccagctcggcttcggtcagtgcgagccgctggctgcgggccgaaagctgtgccgagcggatattgttgcgcgtggcgcggcggttgaagatcgggatgttcatcgacagtccgacgtattcgcggctgttgtggcgcatctgggcccagaacttatcgctgtcggcgctgtacacccccgtgccgtagccgcctgaaagcgagatggagggatagagtgccgatttggcaatgaggactgaattctccgaactttcgagccgcagccgctccgccttgatatggggacggttttccgccgcatagttgtagacctcgtctgccgtgccgagccggtgcagcgaggcgagcgtcacgctgtcgagctccggaaccacgacgtcgaaccctgcggcgctctcgcggttgagggcctggctcaggttgagcagtgccagttgcaggtcgttgcgggcctgggtcaggctcagctggtctttggcttgaagcgcctcgctttcgtaccgggccgattccggctgtttgccggcggcgaccagttcgcggctctgcgtggcctgcagggtgctcagggcgagctggcgttcggccacgtcggcgagttccttgttgtaaagtacctccaggtagagtgtcatgacgttgatcgacaaatcttcgcgggcacgttccagatcctgcatggctgcggcgaggtcgagcttgccgcctttgacctggcggttgatgcgcatgccctggaatacggggatgctggtcgagatgttgagcgatcccgaggtctggttgttgtccttataagtattgtcgctcgagagtacgcggccgaacgatgcgtcgcctccgatcgaggcgttcaggtcgggcaggcggctgtatttggccgtcgagagttccacctcgttctgttcgacctgcagggcgcgttgctgcacgtcgatattgttggccagggcatacccgatgcagtcgtcgagcgaccagggcgtgccgggtgccggtgctgcgtcggcttgaggtgcagccggtgcgggctgggcccccgcgggcattgcgcagagtgtggcggcagctgtgcagagtgcggcgaatagggtgctggttttcatgctgcggtgcatttggggttatttcttcttgtcttccttcgcgccgcggactttgtcgtcggcggtcacgccctcggtaagctcgatgttgatgccgtccgaaaggccgatcttgacttcgcgtttgtcgaaggtctgctctgcggcgtcctcggcgctcgtgagcaggtagacatacgttttttcgccctcgaattcgacggtgctctcgggaagcgtcagcacgccttcgcggctttcgatcacgatgctggcgttggcgctgtacccggcgcgcacgaagacgtcggcgggaatcttcacggcggccttcacttcgaacatgatgacgccgttatcctcggtcgccttgggcgaaacgtattccagggtagcgtccagctcgacgttctgcagggcgccgatcgtcagcttcacgggcatgccctcgtgcagtttgccgacgtccgtttcgtcgacgttgccccggaagagcatgttcgacatgtcggctacggaggcgatggtcgtaccgtcgttgaacgtgttggcctggatcaccgagtttccgaccttgatcggcacgtcgaggatcataccgtcgatcgtcgatcggatctgcgtgttgctgagctccttgtagcggctggtgatgccgttcttgacgatctccagattctctttggcgttcagcagttcctcctcggctttctggaggtcggtgcgcccctgttcgaactcctcgtccgagacgacgcccttgtcgtgcagtgtttccgtgcggccgaattcgcggcgggtctgcgccagcgatatttcggctaccgagacgcgcgattcggcgctcgaaagctgtcccatctccgggacgaccttcaccgtggcgatcacctcgcccttgcgcaccatctggccggcctccttgtagacgtcggaaacgatacccgaaatctggggcttgatcagcacctcgtcgcggggttcgaccttgccggtggcgaccacgaattgtttgagcgtgtcgagtttgggttgtacgatcgtgtagactacctttaccggacgggtcttctgccacaggaacacgaacgttccgagcaacagcgccgcaaagagcacacccagaaagattttcagaaattttttcatagccgtaatctattgaatttgattgttattcttcacgtattgcatccacagccttgatgctcagggcccggtaggcggggatgacgcccgccagcaggctgcccgcgacgaggatgaaaagcgccagcatgcctgtcccgaacgatatttgccacgagatctcggcaccctcctgggccacggtcaccgcctggtaatagatcgagtcggcgaccgacagcaccccgaccgcggccgtgaggccgaccaccccggcgatgaaggtgaggatgaaactttcggagagtatctgcgagatgatggccgtgggcggtgcgcccagggcgcggcgtatgccgatctcctgcgtgcgctccttgaccagcaccagcatgatgttactcacgccgacgatgccggccagcagtgtccccaggcccacgatccatgtcaggaacccgatgccccagaagaggctcatcaccttgtcgaacatctcggccgtggccatgcaccaggcggctttctcgtcgtccggcgagatcaggtgcttggcgaagatcaccgacttgcaggcggtttcgacctctttgctcggggtgtcctcccggccggcgatggccagcatgtggatcgagttgcccccgccgtacatctgctgcgcgagcgagatcggggctacgaccgtgcgttcgacgttgctgaacgacatggccgtgctctggcgccgcatgacgccgatgatggtgaaatagctgttgttgaccttgatgaccttgccggtcgggtcttccattcccgggaacaggtctttctggatctgggtgccgatgacgcagaccttgcgcttctgcgccatgtcgacgtcgttgatgaagcggccgtagatgatcttctgcgggttgatctgctggtagtcgggcatatagcccatcagcgaatagtcgcccttgcgttcgttgtagctgcaatggatctccccgccccagtagacgcccgaggcgtactgcacctccttgagcccccggacgttttccacgtcgtcgttgttcatgcgccaccagcggttcttgggcatgcctttgtaggggagcgaggtctgcgaaggctgtatgagcagcgtgttggtcgacatgtcgcccagctgcgcccggaacaggcgccccagccccatgccggcacccagcagtacggtaagcatgaagatgccccagaagacgcccagtgccgtcatgatgctgcgcttgcggttgcgggagatcgtctgccatatctcgttccagcggtctgtatcgaaaaatcccatggcttctacttgttataacgcagggcgtcgattgtcttgagttgtgcggcccggtaggcggggacgtagcctgcgatcaggccggcgatgaccagcacgaccgtcgcgctgaccgcaacgcccaggtcgagcgtcgggttgaggaagatcgacggcgcatggccgccgcccgtcggcgtctggttgagcatgtagttgaccccttccatcatcgccacgccgaataccatacccaggtacccgaatacggcggttatcatcaccgactcggtgaggattagcctgatgatcgacacgggcttggcgcccagcgccttgcgtatgccgaattcggaggtgcgctccgtgaccgtcacgagcatgatgttgctcacgccgacgatgccggccagcagcgtccccaggccgatgatccagacgaagacgttgatgcctgcgaaaaccatcatgaaattcttgtaggtttccatcgtattgtcgagccagatggcgctttcgtcgtcgggggcgaaatggtgctcggcggaaaggcgccggatgacgcgcttttcgaactccttcatcgcctcggtggtgtggacgcccttgatggtgatgatggcattgttcacttcggggctgttggcgttgtagagcagctgcccggtggtcagcggaatgtaacacgacgaactgctgcgctgggcgtcgcccttgtagacaccgaccacggtgaataccgtgctgtcgagcttgatcctggcccccagcggatcggctcctttgaatagcagggactgcatggcctggtcgatgaccagcgacttgcggtattcgcggatgtcggcgtcgttgacgaagcgcccctttacgatctccacgccctcgatctgttcgatcttgggcagcgagccgcgcagccagaccttggtgtattcgttcccgtaggttgccgtatggttgtcgaaccacgagttggcagccacttcgtctacctcggggaattcccgggcgaggatttcgaggtcgctgttccacaggcggatgcggcgccccttctggtagcccatgtagggcttcgaagtacggccgccgtagaggttgatcgagttggtggcgtagttgccgaaattggaggttacgccgttcttgagcccgttgcccgagcccagcaggatgacgagcatgaaaatgccccacgcgaccgagaagcccgtgaggaacgtgcgcagcttgttgcggcgcaccgatgtccagatctccagcagcagttccctcatcgctttccgagtccggtttcggtgatactgctgatgacgccgtccgtaagacggatgatcttgtccgtttggtcggcgatcgactgttcgtgcgtgacgcagatgatggtcatgcccatatcaacgttcacgctgcgcagcaggttcatcacttcctgcgaggtggcgctgtccagtgcgcccgtgggttcgtcggctaggatgatctggggcttgttgataagcgcccgggcgatggccacgcgctgtttctggccgccggacatttcgttgggcatgtggtcggcccactccctgagccccagcatgtcgaggtattcgagtgcctgggcgttgcgtttgcggcgcgagatgccctggtagtagagcggcagggcgacgttttcgacggcgttcttgtaattgatcaggttgaaggactggaaaatatagccgatcatgttgttgcgcgcggcggcggcctgcgtttcgctgaggttcttgatcagccgtccggccaggtagtaactgccgctgtcgtagtcgtcgagaatcccgaggatgttcagcagggtggattttcctgaacccgaggcgcccatgatcgagaccagttcgcccttttctacatcgaggtcgatgcctttgagcacgtgcaggggtgacccattattataggtcttgttgatgttttccagctttatcatattcagtctgccgttataaagcggtttgcgatgttgagggttacaatctgtaagcggtgtgtgaggcgcttgggacaaaggtaataatataatcttgaaaaacaatttatttttatcgaaaatcaataaaaaattaccaaacaccaataaatgtggttataatatcggcaaatgtaagcaaaaaatgcatactatgcaatacagagtactgaaaatcatatattaatctttccgacctatataatataaagatgggaaaaccccgttttatgcgcatatcccggtagggtggccggtgaaaatccccataaatggcgattgccgcctgaggcccgaatcgctatttttgcaggcaaaaattacgttatatgttaaaaaaataacataaacggtttatgggtaatgctttttcgttatatttgttgcgttaggtcaagcatatgaggaaacttttactactgtttttatgcacgattgtcccggctgtcgtgtcggcgcagcgtctcgacgttacgggacgggtgcttgtaaaggataccggcaagccgatcggacaagcagtcgtcgaattgccgcagtccggattgtgggccgtggccgatgccgacggaaacttcacggtgaagggagtcccggccggggaaacgcgttttgtcgtttcctgcctggggttcgttaccaccgaagccgaggtcgacgtgcgtatggggatggggccggtcaggctttatgcccccgaggataacctgaaactggagagcgtcgtggtgacggccaaggaggcgcccaacgccatggctacgtcgcgtacgatcggcggcaatgccatcgaccacctgcaaatggtcaatgcgtcggacatctcggcactgctgccgggcggcaagacggtcaaccccgacctgatgaaggacaatgtcttctcgctgcgcagcggcgggagcacggccggcaatgcggcgttcggtacggccgtcgaagtcgacggcgtacgcctttccaccaatgcttcgctgggcgacccgacgggtgccagcacacgtaacctgtcggcgaccaacatcgagtcggtcgaggtagtgaccggcgtaccttcggccgaatacggcgacatctcgtcgggcgtggtgaaaatctcgacccgcaagggcaagacgccctatacggtgacactctccaccaacccgcgcaccaaacagatcgccgcctcgaagggcttcgacctgggtcaaaaccgcggcgtgctgaacagcaacgtcgagtatacgcgggccacgaagaaccctgcgtcgccctacacctcctattcccgcacggggctggcgctcaactaccagaataccttcgccaaggtgctgcgcttcaacttcggcgtgacggccaatatcggcggtatgaataccgaagacgaccccgatgcccagaaaggcgagtgggagaaggtgcgcgacaatgtgctgcgtgccaacacctcgttcaaatggctgctgaacaggtcgtggatcacgagcctggatttcgatgcgtcgctcaactataccgacaaccttgcgcgcaagcgcacctataatctcaattcgacctcccttccggccgtccatgccgaacaggaagggtattacatcgccgagatgctccctccggtctattattcgaccaaatacgtcgattccaagcagctcgactatgcggccaacctcaaggccacgtgggtgcgcagctggggcgacgtgcacagcaatgccaaggtcggcgcttcgtggcgggccaacggtaatgtcggggacggggagtactatgcgactccctccctcgcgcctaacggttaccgcccccgtccgtatacggacatcccctatatgcataacctcgcggcctacgtggaggagacgctgactgtgccgctgggggcgaccacgctgcaactgatggcgggcctgcgtgccgaaaagacttttatcaaaaatacgcaatacgagaatacgtcgagcctctcgccgcgcttcaacctgaaattccgcatcaacgaccgtctgactgtccgcggaggctggggcatcaccgagaaactgccgtcgttcaacgtgctttacccgctgcccgaataccgcgatacgcccgtgttcgctaccaactatgggtcggggcagagcgcctatgtctaccacacgcagccttaccagatactctacaacgacaacctgaaatggcagcgcaaccgcaattccgaggtcggcgtcgacctgcgtatcgggggtacctcgatctcgctggtcggctatttcaaccgcacgaaatacccctataagctgagcgccgccttcgagccgttctcctataatatgatgggcgtgccctccacgctgcccgacgggactgcatacacgatgccggcgaacccggctttccgggtcgacagccagacgggcgaaatcttcgtccgtgacaaggacaacccctcggccggctggatcgccatgcagaccacttccacgaagcggacgttcgtcaagaatacctaccagaacaacggttcgcccgtagaccgcatggggctggagttcgtcgtggaattcccgcagatcaaccccatccgcacgcagctgcggcttgacggggcttacggctataccaaatacgtcaacgagggtgaggcatgctactatccctcgacctcgaccggcggcgagttctacccctatgtgggggtttatctcgataacgggggcagctccaacgtcacctacaacggccggaagctgcatgcgctggatatgaacctcacggccacgacgcatgtgccctcgatccgtatgatcatctcgctgcggctcgaagccacgctcgtgaagcgctcgcagaacctctcggagtacagggggcgcgaatatgccttcaatgtcgacgaggatcgtaaccccaccggcgggagcatctacgacggagacagctatacggcgatctggcctgtggcctacatcgacctcgacggcaaccgccatcccttcaccgatgccgagaagaacgatccggccttctcctccctgctgttgcgttcgggcaatgcctactctttcaacggcgacggttacgacccctatttctcggccaacctgagcatcacgaaggagatcggcgaccatgtctccgtctcgttctacgccaataacttcaccaattcgcggcccttcgtcgcgtcgtacgccacgggtgtcaaggcggtcttcacacccgatttctattacggacttacggtacgtcttaaattctgaaaacgatgagaaagatactttgcatattgtcctgtctgctggtggccggttgcacgtcgttcgacaggaacccttacgacggtgcgctgcgcgaactccgtgtgacggccgtgtatcccgaggggtacgccggctatctgcgcgaaggcgtcgcggtgaaactctccgaccgcaatacgggcaatgtttataccgccctgaccgatgcgcagggccacgccgggttccgcgtcgctgccgggcattaccgtctctcggtgctcgacctgcccgacgattcggcggtattcaacggtacgatcgagcaggtcgaccttgtcggcgaggacaaggaagtcgacgtggcgctgaaattttccaagccgggtacgatcctcatcaaggagatctactcgggcggctgcatgcaggatccgccggcgacggggacttatgccgacgacaaatatatcatcctgcacaacaacggtttcgagacctattaccttgacgggctgtgcctggcgatggtcgccccctacaactcgcaggccgccaatccctggacgagcaccgacccttcgggcaacatcgttttccgtgattacgccgccgtacccgactgtatctggatgttcccgggctcggggacggatttcccgctgcaacccggcgaggatgccgtggtggcctaccatggcgtcgaccatacgcagacctattcccagtcggtgaacctcaaccgcaagggctgtttcgtgctctacgacatggtatactatcccggcaacaagttgcaccccacgcctgtcccgggcgaccagatcgaccaggcgcattacatgaaggtgctgaaaaagaccgggacgaatacggccgtcgtctacgtgatctcgcagaattcgcccgccgtgatccttttccgggcgcccgaagggttcgatctggatgcctatctggccgacgacctccagtcgacggttcagagcggcagcatcacctattcgaagatcccgtgggacgactggatcgtggacggcgtcgaggtatgcaacatgaccgaggcgaccaagcacaaacgcctgcacaccgatgtggatgccggttacgtcggcttctcggccaaggcgcagggacataccctgcaccggaagctggatgaagcggccacggcggctgccggcttcgaaaggtacgtggataccaataactcgtcgaacgatttttatgagcgtgagacacaatctttgcgagattagcctatgagacggattttaacgatactgatgttggccgccgtctctgctgccacggcgcaggagcgtttcgactatattttccgccgcaacccctggaacggcggcccgaacgctgcgggtatccggcaggactccctgagccgttcctatgccgaaatctatttcaccaaggagaacggcgggcttacgggccactccgcgtcggacgacagctggaatgccggggcgaaaaccgagtcggtgcgccacctgaagaaggtctcgttcgcgggcgggttcggctacgactatttcgacggccgcaacatgtgcggctcgatgttcaccgaaccggggtattatccggtggacatcctcgaatttacgccggggcgcaaggtgcgcgaggattataccttcacgggcggtatgtcggccgtgctgggcaaccggtggacgggcggcctgcgcgtagagttcgaagcccgcaactatgccaagcgcaaagacctgcgccataagaacacacggctggatttcgaattttcacccggtataatgtaccacgcggggcgttttgccgccggtgcggtctatatcgtgggtacgaacagcgagaaggtcgatgcggaaggcgtgggccccggtgccgatctgtacgaggcattcttcgaccggggactgctctacgggtcgctggagaagtgggggagcaccgacatacacctctcgaccaacggcgtttcgggattccccgtccgcgagaatacgcagggggcgggcgtccagttgcaatacgggccgttctatgccgacgtcgcctaccgtaacaggcagggcgagacgggcgagagccgcattatctggcatctgttcgaaacgcaccaggtgacggcgaacgccgccctgtcgctgggaacggcactgcgcaggcatttcgtgcgcgtgaatctcgactggcagacgctccgcaccgacgagaacatcatcaccaccgagaccatcaacggcgtgcagaccatcaccatacacggttcgacaccgactttcgggcgcaaggggctcgaccttgggggcgaatacgagttcgtggcaccgcatacggatttgcgtgccggggtcggttattcgcagctcaaccgcgaatcgacgctgatgtacccctatgtcaaggggcagaagctccactttaccaagatatatgcctcgctgatccgcacgttcggcctctgggagctgaccctcgcggcggattaccgcctgggaggtttctcggagtgtgaaacgcagttcgaaacccccggcgtgcagccgggcgaatatcccgggcagctgaccgcttactacgattacgaaaacgaatacctcacggccaaacggctgggggcggcgctcgggctgcggcgcaatatcaaacggttctatgtcgacgtgttcgcgcgttacgaacacggtttcggactggaatacgtcgcgcagcccaaccgggtcgcggcgacgctgagtgtaggatataatttttaaattcaaaaggatagattatgaaaaagattttgacattgatggcagtcgcggcgatggctttcaccgcctgctcgaaggaagaaagcaccggaacgggcgacaagcaggtgcgcatcaccccgacgatcgccaaccctgcgctgacgccggcaagcatgtcgtccggcacgcgggcgacggacaccgatttcgagctgaacgacaaggtcggcctcacgatcacgatgacggcggacggttcggcgttcgtggcgaacaaagagatgtcgttcgacggcacggacttcaagaccgagggtttcctctggtacgaagatgtcaacgccacctcgacgctcttcgcctattatccctaccaggccggtgccgcggcgcctgcggagttttcggtaaaggcggatcagagcggtgtgaactacacggcttccgacctgatcgtggccgtgaagacgggggtcaagcccacgctgtcgtccacgcagatgaccttcaagcacaaaatgtcgcggatcgtcatcagcgtgaccaacgaatcgggtttcgacatccgggacatcgtcatcaagggtgctgtcggcaccggtgtgctcgatcctgccacgggcgattttacggccaaggcgggtgccgaggcatccgacgtgaccgccaatacggctactgccgagaaagtttactacgcgctgctggtgccgcagaacggtgtgcagctcaaggttacggtcaccacggccgatggtaagatgcgtacgcagacgctcggcacgaccgacctcaagtcgggtgagaaccgccgcatggactgcaacgtgcagccggctgacattcaggtgaaattcagcggcccgatcgcgggctgggtcgacggagacgacctgctgccggacggcgacggcgaagtggagaccccgaccgtcgagtggggcggcgtgaagtacaagatcgtcacgctcaaggacggccgcacgtggatggccgagaacctgcgctatgttcccgaaggcaaaaccatatcgagcgacccgaaggacggcaacggggtgtggtacccctgcaacctctcgaaagccgccgacccgtcgttgactgagaccgcgggcctgctgtacagctatcccgtgatgctgggaatgaccgacgagatgacgggcaccaatttcgaccaatacgagggtgcgcagggtatttgccccgacgggtggcatatcccgacgatggccgagtggctcaagctggcgggtgtcggcagcggcagcctgtccgacccgacgtcgccctatttcgacaagacgcagagcggcggttcgattgctgcgctcaacaaggacggtttcaatattgcgggctgcggctatatcaatgcggcgagcgccacggcgaccccggcctatatggccacggtctcggctgtcgacgcttcggcgttcggcatgggatatttccccagctcgacgggttacaaggttacttacaatacggccgacgatccggaaagcggcatcaagaacatccagtattatgccggcatgataacttacaacaagagttacaatcgcatgacaatcgcttaccagggtggttattgcgccgctcccgtccgctgtatcaaggacaaggagtgatcctcacccccgcacacacaaacacacacaacacaaacaacaataaatgaaacgtaaacctaattatctgaagcacctgctgcaatggggcgtactggccgccattgcgggcacggtgctttgggccaaattgagcgacaaacccgtcgatgtcgaggcatattgtcctttcggcgggttgcaggctttcggtacctatgtggtgaacaactcgctggcctgctcgatgtcgatgctccagatcatgatgggcctcgtgctcgccgtgggagtgattctgttcagcaaacttttttgcggatacctctgtccgctgggcaccgtcggcgagtggatggggcgtgccgggaaaaaactgcacctgcaggtcgatgtcccttcgggcagcgtcgtcgacaaactgctgcgcgtggtgaagtacgtgctgctcttcacgatcctctatttcacgctctcgtcgagcgagctgttctgcaagaaactcgacccgttctatgccgtggctacgggtttcaagggcgaaatcgtgctttggatgtcgctcacgagccttgcgctgctgctcctgggcggcttcgtggtgaagatgttctggtgcaagtatatctgtccgctgggagctgccagcaacattttcaaattcacgctgctgttcgtgatcgccgccctcggcggctgggcgctcggtgcgctgggcgttgcgaacgcatgggtatggacgatcggcggcgcatgtcttgccgcctatatcgtcgagatcgccaagatgcgcagctgcaccttccccctgatgtacatcaagcgggacttgaacacctgcaataattgcggactgtgcgaaaagaaatgtccctaccagcttccgatccatgactatgtgaaggtgaagcatgtcgactgtacgttgtgcggcaactgcatcggtgcgtgtgccaaggatgccttgcaggtcaacggccgccgttcgctgcgctgggtgcccgggttgctggccgtggtgctcttcttcctggccatatggctgggttccaccatggaactgccgacgatcgacgagaagtggggcgactacgagaaggtcgagaacctgcagacgttcgagatggagggcttgcagacgatcaagtgcttcggttcgtcgaaggctttttcggccaagatgcaggccgtgcagggcgtatacggcgtcaagaccttcgtacgccgccatggtgtcgaggtgctttacgacccggctgccaccgatacgctgaagatacaggctgcgatctttgcgccgacgctgcgcaaatatgccatgccgggcgagcaggtgccgatgctcgacgtggtgaagctcggcgtcgaagggctccacgaccggatggatatgatctatttcggcatggtgctccagaagatcgagggagtctacggcttcacgtcggagttcgcctgtccggtggatgtgacggtctacgtcgatccggctgccggtattaccgaaaagatgttcggggaggcgatcgacgccaaggaactggtcatcccgaccaaggagagcgagaaggtgatcccgatgcatacggtgcttaaaagctatgcggtcgccggacaggtttcgcgtgaagagtttgcgcagatcatgttccgcgatgtggagaagctcgcgggcaggttcgttgccaaccaggagaagtggggggacgacgagcagttccccaaggcggtctacgagatggtattccccggtatcgagaagatgccgatccgcaatgcgttcccctatttcaagagcttcctttcgtgtacggacggcatcgtgtccgtggatttcgtcctgcgggatatgaagcccgtgatgcgcatccgctatgtgaagtcgatgtgggacgacgcgaagctgtggaaagaggttttccaggccgaaaaatggacgctgcgcatggctgacggcaccttcaaggaggctgacccgcggctgaagttcacgaccgagggtaagaccgtcgaagagtaaccctaaactcaacgggagggcgtcggcgacggtgccctcccgtttataagaatgaaagatatgagaagatggatagcctgtctggccgttgtgctgctctgtatgcagactgcaagggccgacgagggcatgtggctgatgcaccggctggcggagatttatccgcagatgaaggcccggggactgaaaatcaaggataaggagatttacaacgagaaatcggcggcgctggccgatgccgtggtggctgtcgacggcggcatggggacgggcagcatgatctccgaccaggggctgatgattaccaatcaccatgtggcttacagcgacatctgcgccctgtcgacgcccgaatgcaacctgctcgaaacgggattctgggcacgtacgcgcgatgaggagattcccgtccccggcaagaccgtgtggttcgtgcgcaaggtggtcgacgtgaccgacgaggccaatgcgctcaaggaggagatgaaagccgccgggaaatggggcatgatggccccgcgccgcctctatgccgaactggaagggcgctacggccgggaaacggagtgcgaggtgtcgtgctactcgatgtggggcggcaaaatgtacctgatgttctactacgacatctacaaggatgtgcggctggtgggtacgccgcctgcgtcgatcggtgccttcggcggcgattacgacaactggggctggccccagcacaagggcgatttcgcgctttaccgcgtctatgccgaccgggagggacgccctgcggcctattccgccgacaatgtgccgctcaaaccccgccgcgtgttgcaggtcgccacgggcggcgtgcatgacggcgacttcgcaatggtgatcggattcccggggcgtacgaaccgctatgcgtcgtcgttcgccgtggccgagaagcagcgtgtccggaacccgatcgtcgtggccaaccgccatgaccggatggatattctcaaacgccatatggaacgcgatccgcgggtgcgcatggagtattcggatgcttatttcggcctgagcaactacgccgactacgccaagtgggagaacaaatgcctgcgccgtttcgacgtcgtggcgatccgtgaggccgaggaggaacgcctgcagcgttggatcgaggccgattccgcccgcaaggccgaggacgggacgttgctcgaagagctcgcgcgcggttacgaggcgcggcagggcgccgagcgcaacctcaattatttccgcgaggcatggctcggccccagcgaggcgctgctcgtggccaaccgcgtgtcgtcgtaccttggcaaactcgaacggctgaagcaggactcgctgatcgtggattcgaaggatgcccgaagcgtcgtggccgggagcggccgcctgcgccgtaactacgatgccgcgaccgaccgcgacctgttggcgcggatggtggtgaacttcacggccaacgtgccgcgcgagatgtggggcgtgcagttgcaggcgatgtacgaccaggcgggaggcgatgccgaccgtatggcgcgtgcggcgttcgatgcttcgttttgcagcgaccccgtgcgttacgatgcctatttctcgaagaaccggtcggtggccgaaatacgccgtgaccccatggtggcgcttaccgaatcggtcaccgtacagcgttttacgggcggtgtggacaaggccgaaaagcgcggccgtgcgcatgtcgggcggagcgagagccgctatgccgacctgctttacgatttccgtgcttcggaaggactggcgcagtatcccaatgccaactcgaccatgcgcctgacctacggtaacgtgcagcccctgaacccttcggacggcgtgcattacgattcgcgttcgacgattgcgggctatatggagaagtacaaccccgacgaatacgaataccgtgtcgacgaccgtatgcggcggctgatcgccaaacgggactggggacgctggggcgagaatggtacgctctatgtcaatttcctgaccgacaacgacattacgggaggcaattcgggcagccccgtactcgacggcagggggcaccttatagggcttgcgttcgacggcaaccgcgagtcgatggccggcgacgtgtggttccatcccgaattggcgcgcacggtgtgcgtggatatccgctatgtgatgtgggtgatcgacaagtatgccgacgccgggtggttgctcgacgaaatgaagttcgcaaaataacccggtgtgccggtggtaaccgcggcatcccgacgtgtcaagcagacctgccaattggcaggtctgcttttgttgcaggggcatagctgtccggtgtccgtatccgtatggcttttgggatcggtgtccgtctgcgtatccgtcgcgcgtttggggtcggcgcccgtatccggtttcgtcgggcttttgccttcggcctccgtctctgttacgtgtttggggtcgacctccggctcctgtccgcgtctatcccagaagcaactgccgcagggcgggaatatcttccgcaataaatgcgggttttgcggtctgaagctcttcgcggctgccgtaaccccacagtacgccgatggcggcaagccccgttgcggctgcgccttcgacgtcatggcggcggtcgccgatcatcacggcacgggcggggtcgtcgatgcccagcgtggcgagtgcatggcggattacgtcggccttggcgtcgcgcgagccgtcgggcgtgctgccgctgataagcgcgaagtcgtccgcgaacccgaaatgccgggcaatctgctccgcgaaacgggtgggtttcgaggtcgccacgaccagtgtcgccccgtgcgcccgcaggtcgcgtaacaactcggggatcccttcgtagagcctgttctcgaaaatccctttcggggcgtaatattcgcggtatttttcgacggctacctcggcatcggcgtcgctcatgtcatagaattcgcggaacgaattgcgcagcggcggcccgatgaaggggcacagcgccgtggggtcgtcggcctcgatgccgaaatgccgcagggcgtactgcaccgaacgggtgatacccggcatcgggtcggtgagcgttccgtcgaggtcgaaaaagaggtatttccagcgcatggatcgtcgttttatattattccggacgaatcacgctttttacgctattccttgccggcttgccgggtggaaaaatgcaggataagcgtgtcgccctcttcgaagaggccgggcgcccctatctgagcctgaggaacgagtagccgaagcgttcgcaggcggccttttccagcttttcgcgcaccgagggatgggcgacggcgatcaatgcccgcgcccgctgggcgaggttgcggccgcgcaggtgcgcaacgccgtattccgttacgatgtgctgtaccatgtggcgggtcgtcacgacgcccgcgccgggcgtcagcagcgccttgattttcgattcgcccttgagagtagtcgacgggatggcgatgaaggttttcccgccctccgacagggctcctccgtacatgaaatcgtgctgcccgcctacgccggaaatgatgcgctcaccgaccgagtcggcgcagacctgccccgtgaggtcgacctcgacggccgagttgatcgccatcacgcgcgggttctcgcggatgcggaacgggtcgttcgtccatgccacatccttcatcacgaggtctttgcggtagtccatataatcgtacagccggcgcgatcccagcgccagcgaggcgaccgttacgccgggcatgacccgtttgagcgagttgtcgatcacgccgctttcgagcagcggcagcacgccgtcggtcatcgcctcggtatgcagcccgaggtgtttgtggcccgtgagcgcggccagcacggcattggggattccgcccacgccgatctgcaatgtcgctccgtcggggatcagttcggcgatgtggttgccgatcctgcgttcgatgtcggtgggggttgccgagggcacctcgaccagcgggtcgtcgacctcgacggccgcggcgacgcgcgagaggtggatcacggcgtcgccgtaggagaacggcatggccgtgttgacctgtgcgatgattgtcctggcgcattccacggccgaaacggccaggtcggccgagacgccgaacgagcagtagccctcctcgttggggcgtgagaggttgaggattgccacgtcgacgggcagcgtcccgtcgcggaacagccccgggatttcgcccaggaaggccgggatcgactgtccgtagccctgggccagccagcggcggatgttattggccacgaacaggctgttgaccaggaacgtatccttgtattcggggctgcaatagggggcgtctgccctcccgacggcgaatccggagtagagcgtgacatcggtgagctcggcggcgcggtcggtcatggcgcggacgagcacttcggggatcgaggtgctgccctgaatgtagacgctgctgtgcgggcggatgagctttacggcttcggcggctgtcgtgaatcgcataggcttatcggtggttttgcccgaaggcggttaggcgtgtttcgagcagttcgaactgctcggggcggttcagttgcgaaacgcagacccggatgcccggctggcggctgccggtcgatgtgagcgatatggcgcagatgccgtagaggagcagttcgctcagcagctccgcgctggagagaccgccgtagccgacggtgtagaagaatccgtcgctgacggtttcgtcctggtctttgtcgtagacgatgcggaagccgtggcgctggaagatctccttggtgaggcgggcgcgccgggcgtattccgaggtttcgcccacgaaatcgaggtgcccgtcggccgcagcgcggaacatcgccgccagggcgtgctgcgccgagtggctcgtgcctgacgaggcggcatagaggaacgtcaggacataggcgtcgcccaggcgccccatgccgtagcgctgtttgagcgcggggtagtgccgcgggtagagtttgtcggagatggctgcgatggcgatgcgctggccggcgtagctgaatatcttcgagccggagatcatcaggatgtagttgtccgtgtacctggccacggtggcctggtagggcgcttcgaaggggcgtcccaggggtttgcggaagtccatgcaaaggtaggcgaggtcttcgatgacgatggcgtcgtatcgggtagccagctcgccgatcgtacgcagctcatcctcggtgaggcatatccacgccggattgttggggttcgaatagacgatggcggcgatgttgccctgtgcgaggtagctttccagcttcgggcccagtttttcggcgcggtattcatagatgtcgaacgacgcgctggggatatcgaggatctgcacctggttgcgctgcacggggaatccggggtcgatgaagaggatcgtatccttcccgggcacgagctgcgagcagagcaggaaagccgtgaaactgccctgcatcgacccgaccgtcgggatgcagccctgcggtgcgaccccgacgtcgaggaacgcgcggatgaaacgcgaagcctgttgtttgagttcggggatgccgaacatgttggggtactgcgatgccacgcctgattgcagagcccggcattcggcttcgacccccgccttttcgggcggaagccccggcacacccatttcgaggtgcaggaattccatccccgtctgtgtttccatgatgcgggctatgtcgcccgactggcggatcgtcgcttgggcgatgtccgcaatgtccatgcgctccagcgcggagtcgagcacggagcggtctatcggcagccttcccattgtgcggtctgtttttgtgcgtatgcgtagcctgcgcggaatgccgcgaggttcgtgtcgacgatggcgtcgcccttgcgggcgaaaatggcgcgtatgcccgcttcgagtttttcgggtgcgatgcccaggaacggtgctgcggcgcccagcagcacgatgttggcggcacggggcgatgcggcctggcgggcgatggcatccacgtcgagtgccacgctgtgcggcagggaggctatctcccgcccgagcgtatcggcatcgggatagtcggggatgttgaccagcggggcggtgttggtgatgacccagcccccggtcgaaagccacggcaggtagcggagtgcttccatcggttcgagcgagatgatcaggtcggcggcaccccgcggaatgaggtcggaggcgatttcatctgacgagatgcgcaggttcgactgcacgtcgccgccccgctggctcatgccgtggacttcggcctgcttgatgtgcagcccctggtcgagggcagccctgccgatgacggtggcgatcgagaggatgccttgtccccctacgcccgagagtatgatgtcgcgtttcatggtttgcctgtttttagggttttgccgccgggcggtcgccgcgacgggcgtgtcgctattgtttctgtttggttgcgttgtgccgtttggcggtctgtatgcattcgcggcgggggatgatgaccgagacgccgtcgaaggcgatctcttcgcggagcatggccttcatctcttcgcgggttcggggcagcggcactacgacgcggatgtgggcgggggcgacgcccaggccggcgcatatctgttcgaggcgtcccgtgccggccgaatcctggcctccggtcatgcctgtggtgaggttgtccgaaatgacgaccgtgatgttcgtcccctcgttcacggcgtccagcagcccggtcatccccgagtgggtgaaggtcgagtcgccgatgacggccagggcggggtgctgtccggcgtcggctgcgcctttggccatcgtgatcgaggcgcccatgtcgacgcaggtgtcgatggcatggaacggcgagagccaccccagcgtgtagcagccgatgtcgctgaataccttggcattttcatattcgcctgctacctccgtcagtgccgtatacatgtcgcggtggccgcaaccctggcacaatgcgggcggacgggggacgacgatgccgctggcggcgaggggcgcgtgcggggtgagccccagggccgtgcgtacgctgtccggagtcagttccccggtgcggggcagttcgcccgacatgcggccacggatctcaatgggcgcaggcaggatgccgcgcagggcttcttcgacgacgggttgtccctcctcgatgatgagcagcgccttgcattccgacgccatgcggcgcacgagttcctgcggaagcgggtattgcgatattttgagcaccgggtgcgggcatccgtcggggtagttctccatgaggtagttgtaggcaatgccgcaggcgatgatgcccagcgatttatcttcagcgtcggcgtaacggttgaagcggcttgcagccgcctcctcttcgaagcgggcatagtcggcgagcaatgcctcgtatcttacgcgcgaattgcccggcatcagcacccattggcgcgtccgggcgggataggcgaggctgttctcggggcgtgcctcgcgcggttcgaccatggcgcgcgagtgcgccatgcgggtcgtaaggcgcatcagtacggggatgcggtatttttccgagaaatcgaacgcggcctgcaccatctcgtaggcctcctgctgcgtggagggctcgaacgtcgggacgagtgcgaacttgccgtagaagcgtgaatcctgctcgttctgcgacgagtgcatcgaggggtcgtcggccgccacgacgaccagtccgccgttggctcccgtcatcgccgagttgacgaaggcgtcggcggcgacgttcatgcccacatgtttcatgcacaccaaggcgcgctttccggcgaacgacatgcccagcgcctcctccatcgccgtcttctcattggccgaccatgtgcagtggatgcctcgttcggcggtgagcggatgtccttgtatatattcggtgatttcggtcgaaggcgtgcccggataggcatagacacccgacaatcctgcgtggagcgcccccagtgcgagggcttcgtctccgagtaataattcccgttttgccatgaggtcgtgcagttatgctgttttcacaaatttaaggaatttttaattaaaaattcacttttaatgataaaaaatcacataaaacggtatttaatatttaaaatattatataaataagtgtttttggaaaaaattgtaatatggcatccgttccatacaatgacgactggcaggaacgggtataaaaaagcagccgatcccgaaagaccggctgccccgtttgcgtcattattccccgaatagtgttttcagtaattcgggcgttttgatttcttcacaatttatgcttcccaggagcccgcggcccttttcggtcagcgaaaagtacatctgccgcttatcgttcgtacccaactcccggtttacgtagcctttcccttcgaccgagcggagcaccttcgaggtgttcgacggagtaagccccagcatttcgcccagctccccgcaggagagacgtccggctttcgaaaggctgcataaggccatgccttcgttcaggcagatcccgtgcgagcgttcgagtgccgcttcgaaccggttgacggcccgttgcagctcgcggatcctacacagtttttccattgtctgccggtttgcgtatggcctgtttgccgcagtgcccgatacatttgccgcattcgatacatttctccgggtcgattgccggaagcccgaaccccgattgggtgatcgccccgacgggacagaccaaaagcagcgggcaccggtggttctgcgggcagcggagattgtctacggtgagtgccatgcctgtttacttgttgagcagtacctggtcgatggcttccttgagcgacgccttgggtagggcaccctgtgcgatctggggcttgccgctggtggggatgaaaagcagcgtcgggatcgagcggatgccaaatgcggcggcgagctcctgctcctcttcggtattcaccttgtagatgtagatgctgtcgccgtactcggcagccagctcttccagaaccggggcaagcgccttgcaggggccgcaccatgatgcgtagaagtcgatgagcgccggtttgtcgccgaggtacttccactcggtagggttcgtttcgtaatttgcgactttggtcaggaaatccgccttggtcagtgcgatcgttttcatggtattctcttttttagtgttgttttccttgttgctgccgtttgcgcaggctgccaggccgagcatgcacatcgtggtcaataatagttttttcatgggctttatccgtttttatcgttcttctgtatcaataacgatgcaaagatatgaattattttccatcaaaacaaatttcctatggaaaataacaagtcggatagaaaatgaattattaaaatgccgggagcgcgatagtcgtcataaaaacaatcgaaccgattcggaatggaaggttcgattgtttttgggaattacaacagctccatctgaacatcttcgatatggcacttttcgggggtgtagatgcagccgggattctctcggatcgtccgggtaatgaaatccctgaattctcgttcagaattttcttcgctgaatatgtccctgccgattatttcgtttagggcgacccagttgaatttattggctttattggaaaatcttcgaaaccattttcttatttctgttccgttccgcacgcggatgctggagctgttttccgaattgctgcttgtcttcacctggagtaaagagccgtcttccttgcaaaagtcgaccgcgtctatggtgcttccccagcagcaataccaaccatacgggtgtaaaattgtcgccagatattcttcgagcagattgccgaccatcccctcgattgtcatcatgatggagtgccctttttcaagtgtatctgcgaaattgtcgtcgatatcttctcttcgggttcggagaattaattttacggcaggatccggttttgtttgggattttttgccctgccgtttggacggcctgccattgtatcctgatagatatcgtgcaacccacttcttgacatattctttgagggggatgggctcgttctggttaaatttcaatgccggtagattgcgtatatctctaaatgccacactcagaacgactcctaattctttcgtgtaagcgtcttttgcaaaagttttcgcaagcgagatcgctttttttaccgaaaaatcatcgaaattagtggtttctttcattgggggatgtttttctgataaagttaatgattatttgtttcataaatagcggtatcaccggcttttcttttttttctgggtgaaaaggcataaaatccggcaggtttattcactgtccggcacattattatgtttaaccgatacaatcggtttgcaccttggtttacataaacggtgagaaccgaggaaaaacaggcttgaaacgagacacggaaaaactacctgcattgccgaaagagtttggtttcagcgatgtaactcgctaaaaaacaatagagggagcaactttctttgctccctcttcgtgacaccgacaggactcaaacctgtaaccttctgatccgtagtcagatgctctattcaattaagctacggtgccgaattgcaggtgcaaatatagggtgaaaatcctaaacacgcaaattattccgtaaatattttaataaaaagatggcccgttttgtgtcggaaacatacaccggtcggattatcagagggttgttgccacggctattccagcatttcggcgagtttcttcgaaagctccccgccgcgcaggttcttcgctacgatgatgccgtcgggcgagatcaggaagttcgcggggatcgacgtgatcccgtaggctgcggccgccgtgctctgtttgtccgcgtcgatgcccaggacattgatccacggcatgtcgttatccgatgtgaacgaccgccatttcgtctcgtcgttgtcgagcgagacgcagtaaatttcgagccctttggctttgtaggcggcgtatgcctcgcgcaggtgggggatctcgcggcagcagggggtgcaccaggtcgcccagaagtcgagcagaacccagttcgcctttcccgcaacggatgacagcgggatagcggcaccttcggcgtcgcacagggcgaggtcggtgtacggctggccgatagctgtcttttcgactgcttcaatccgcgcgagcactcctctcaggatcggatgtgcctgcatctcgggggagaactccgcaaggcgctcccggacaccggcgggggtgccggacgattggaattgctggaacagatatgcacccagcaggttgtcgttgttggccctgacggctgttgaaatcacctcattgcgttccgatgcgatagtccggatcgtttccgggtttccgcccgatagcttttcgtcccggaggcgggcgtcgagcgccgcacaagaccggtaaaccgagtccgcccggtcgttgagccgggtgcccgtgacccggtagccggagccgtttctgggttcgatccggatggtgcccgcttcgaggaagagcatggccggttctaccgtggcatagcggtcggacagggatgccagttcgggtgctgcaatgcgtcctttcagcgtaaaggtcgtatctgcatccatgactccggctgcaagcaccgtattgccgctgcccagcagatataccgagtcgcccggtgcgaggccgtaacgcccggtgacggtgtaatgagggccaccgcagccggataggagtgccgtggcgataaaaatggcagagattcttttcatgctatgggtctgtgaggtttatttgagctcccggtcgggatggtctttcagaaatttctcccaactctgggagccgcgtttcgaagctgcttttttgccgccgcccagcccttttacgcgctcgtcacccagggccgtgttgagcgggctggccgttgtgaagtggtggcacaaggctacggccatgccgtccgtggcatcgagccgtctggggggctgatctatcgagaggatgcggcagacgatggctgcgacctgttccttggcggcggaaccgcgccccgtgatgctctgcttgatgcgcatcggggcgtattccgaaacggcgaggccgcggctcagcgcagccgccatggccacgccctgtgccctcccgagtttgagcatcgactgcacgttttcgccgaagaaaggcgattccaacgccacttcgcgcggggcgtactggtcgatcagcgctccgacccgctcgaagatataacgtagcttggcatagggatcggtcagtttgtgcaggtcgatgtcgcccagtacgaccgaacggacgttgcgcccctcgatttccaacaccccgtaccccatgtaattggtgccggggtcgatgcccatgatgcggtatgtctcctgatgttgcatttttttaagcaggttgttatcccttcgttattcggaataaagacaggcgcttcttccgatatttcaatatgtgggacgcctcgccgcagcggatgaagatccggtagtcggaagcatcccgaatttgcgtgctggaatatatttccggcattgcatggtgttcgggtcgagggatgcccgtaaggccgtgttcgtgttttcgggcagggccgtttcggctttttgcaaagaaccgttccggtggccctgagcggaggcggacgggtatccccgcgcaggacggattactcggcgagcaattcggcgactttgctgcaaaggtcttcgccgcgcaggttcttggcgacgatccggccctgggcgtcgatcaggaaattcgacgggatgctttgcacggcatagtctttcgccgcgaggttgtcgaagccgttgaggtcgctgacctgcacccagcccatgccgtgctcgcggatggcgccgagccatttgtcgttgtcgttgtccagcgatacgccgtatatttcgaagccccggccgtggaacttgtcgtaagcctgcttcagatggggaacctcctccatgcaggggccgcaccacgatgcccagaagtccacgagcgtgtatttgttggccgggttgtcgatcaccgaggtcagggtgacgatctgcccgtcggcatcgccctgcatgatgttcatgtagggctggccgatgtcggtcttgagacgttgcgccgcaaccgtcctgagcgcggacaactcccgggacttttgcatccctggcgaaaattcggcgatccggtcgagcagctcctgtcccgaaagcgtgggggccatcccttccagggctatgattccgaacgcattgtcgcggttggcatccgccgttttgcgggggagcccgcccagttcgtcttcgatctcccggcgacgttcatcggaggtgccttcccggtggtattcattcatcagcgccatggccgacgcccagaaagcggcgcttgcatcgtttgccggggtgcccgtcacacgggtcgacccggccggggcatcggggttgtcctcgatcgaaaccgtccccggttcggggaagaacatcgtcccgaaccgctgcacctccccttcgcgcgaatcggtgacggtgcgccgggcggtgatgtccgccgggccttcgaagcggaacttgccgccttcgacgacggccgagtcgatcaggctgtcgccctcgaacatgtagacggtgccttcgagcccggcgatgtggccttcgacgacgtatttggatccggtgccgcaaccgcataacaggactgcggccgatgcgaaaaggagtgtttttttcataggacggggtggttttatcgaaaagcccctccggggcatttgcggctcggaggggctttttattcgcggcgggctactttccgaggagctcctccactttcttgtagaggtcttcgccgcgcaggttcttggcgacgatcacgccctgggcgtcgatcaggaaattcgacgggatgccctgtaccgcatagtctttggcagcttggttgtcaaactgttgcagctcgctgacatgaatccagtccatgccgttgtccttgacggcagcgagccacttgtcgcggtcgcggtcgaacgagacaccgtagatttcgaagccttttttgtggaacttgtcgtaggtctccttcaggtggggaacctcacccatgcaggggccgcaccacgaagcccagaagtccacgagcgtgtacttgttggccggattgtcgatcaccgacttgagcgatacgggctgcccctcggcattgttctgcacgatgtcgatgtagggctggccgacgtcggtcttgagcttctgttcggccgaggccttcaggtcggtcagttccttggtctgctgcatctcgggcgagaacttggcgatttcgtccagggtttcctgtcccgaaagctcgtaggcccggttgggcatcagcgccacgccgaagaaattgtcgcggttgttgtcgatcgtcgaaagcgtcagttgttcgaactccttttcgatggcctcgcggcgctcgtcggtcgtagcctggtcgcggtattccttgatcagggcacggctggctgccgaataggcgtcgctggcgtcgttggccggcgtgccggtggtatggcgaacctgcggatcctcggcgtcgctcttgatcgagatgttgcccggttcgaggatgaactgcatggcgaaagcctgcgggcgtccctcgcgcgagtcgagcaggtagtgtacgcccggcgtttgggcgttgcccctgaactggaacttgcctgccttgacggctgccgagtcgatcaggctgtcgccctggtacaggtagaccgttccttcgagcccggcgatatcgccgtcgatgatgtacttgggctggttactgcaactgcacagcacggctgcggctgttgcgaaaaggaataagtttttcataatgcgaagatgttggttatttttttgatgctgcgagttgcttctccagctcgttcacgcgtttttcgagttcgggcagccgtttgaaaaccgtcgccgaacggtggtactgcatgccgggcagcgccgggtagccgaagcggatctcgccgtcgggcacgtccttgtccaggccgctcttcgagccgatcttcacattgttgccgacgttgacatggtcggcgatgcccacctgccccgcgaggaagcagttgctgcccaccttcgaggtgcctgcgatgccggtctgtgccgacgagacggtgttctcgccgacctgcacgttgtggccgatctggatcaggttgtccagtttcacgccccggcggatgaccgtcgagtcggttttggcgcggtcgatgcaggtattggcgccgatctccacgtcgtcttcgatcacgacgttgcccagctggggtatcttgtcgaacccgcctgcggcattgggcatgaatccgaatccgtcggcgccgatcacggcgcccgcgtgcaggatgcagttgcgtccgatgcaacagccttcgtagaccttgacccccggatagaggatcgtgccttctcccacacttacgcccgttccgaggtatacctgcggataaatctggcatccgttgccgatcttcacgccggcttcgacgaccgcgaagtcgccgatgtagcacccttcgcccacctgggcttcggcgcagaccgaggccagcgggcttatgccgctgcggcggggttttgcggcattgtacatttcgagcagcttcaggacgcaggcgcctgcgtcgtcgaccttgatgagcgtggccgaaagcggctgtgagggctcgaacgtgcggttgaccagcacgaccgacgctccggtagtataaatacaggcttcgtatttggggttggtaaggtagctgagcgagccggccctgccttcctcgatcgaagatacggtgtgtactttcgcctccttgtcgccgacgatttcaccgcccaggaacccggcgatcatttcggctgtgaattccatcataaaattacaggtatttgttaatatctactcccacgggcatgaactcttccaccgaacggccgaacgaaagcacttcgcgcaccgtcgacgacgaaatgtcggccacgggcgccggggtgaacaacatcacggtcgtgatgtcggggtagatccggtggttggtggcctccatcgtgcgttcgtattcgaagtcggttgtgttccgcacgccgcggataatggcgcaggcccccatctcctcggcgaattcgcccgtgagccccgtgtaaatccgggcttcgacacgtgcattcccggcatagaggtcgtcgatcagccgtttgcggttgacgacggtcagcaatccctgtttcgaggtgttgttgccgatgccgatgactacgcggtcgaagaggttcagggcctcgtcgaccagtgccgcatggccgcgggtgaacgggtcgaacgacccggggaaaatagcagacctttccatatcggacaaaggtaataatatttgggaataccgggttaaaaaatgcgaattaatttaccgttcgaactttacatagtccgaatagacgatccgcgtatgcggattcgacgatacgatctcctggcgcagggccttcgtgccccagcggatgaagaggaatcgccgcgggacgcggtgcacgacctgccgcagggtgtcggtgctctccacgcggcaggcgaccgagtcggtgcggatacgcccttcgaccgtaacccaggcatcgcgccagcggaatagtttcagggtatcgcggattcggagcgtgtcccggcggagcaggacgacggtgtcgcggacgggcgcgcgcaggtcgacgctcgtggcggtgactgttttggcggcggcttccagcctccggagcttgatgccgagccggcggatggaggcggcatcctcggcgcggaggcgttcgaattcggcacagcgcagacgcaatgcctgcaccgaggcggcctcttgtcccagccgggtgcggtagtgttcgatgccggaggccagggcatcctggttctgggtgaggcggcgggtttcgtggcggtaacgggcatagccgtatgccagcagcgccgttgtgaggacggcgtaaaggaaaaggtattttttcatggtttccgggttttgcggcgaagatagcgtgtgccgtcccgggagggtttctacatattcggaaacagcccgcggagcgccccggcaatgcgttcggcgaagatggccatgtagggctgcccgtcgcagcgggaaagggcggtgacgccccggtggtcgatgaagaaaagttcgtccatgcgcggcaggtcgtcgcgcccgacgggcgcttcggccagttccagcccggcggcgcggatgctcctgactgcaaggctgcgcccgatgctcgcttcgcccggcggggcgtagacccgcctgccccggatggcgaacagcgccgcttcgtcggccgccatgagagtcccgttgcggtcgcagcgtacggcgacgctcgcaccctgcaacccggcgtattgccgtgccagctctacggcggcctcgcgtgccgaggtgggggcgtcgaacagcggcggttcgtattgcagcgtcacggcttcgggcatcaggctgcgcaggtcgtagccgcggtagagcgaaacgccttcgaattccagccgcagggagcccgatgccggcaggacgagccgcacgaatttcgaacggtcgctgccgggggcttcccgtccggccaccgccgcgatggccgtcccgacctcccgggcgtcctgtggccccgggcacccgaagagcgtgcgcgaccagcggtcgagtacggccaggtgttcccgcaggcagagggactccccgtcgaggacatgtacggtctggtataggtagacttcccgcatcagagcatgaagattttgagcagcagttcgcgcagcagttcgccgtccgatgcacccccggcgttcatgcccttgctcttggcgtcgtattcgcgcagcaggccgaggatgttgaataccttgcggttgtcccagttggcggcgttctgcttgatctcgccgatgacgtagacgttgctcttcttgaggatgcgcatcagctccgtgtcgggcgggaatgcgacccccttgtgccgcgagagccagcggaggtagttcacgacgaagagctccttgaactgcccgaaaagcgccagtacggtgaccagcagcgggttgtccttggggttgcgggcgaaatgctccgcgatcgtcagtgcccgcgccatgtcccgggtcgccacggccttgcacagctcgaagttgttgtagtccttcgagatgccgatgttggcctcgatgtcggcgtcggtgatgcgcttcgtgccttcgggcagcgagacgaccagtttgcccagctcgttcgagattttcgaaatgtcggtgcccaggtggtcggtcagcatcgacagcgccttcgtgtcgatcgccaaccctttcccggcgatgaatcgctggagccacgaggcgatctcgtagtcgcgcggacgcatcgactcgagcaccgcgccgttggcggcgcaacccttgtagaaggccgaacgcctgtcggcgtttttctccttgtggcagattacgaggatcgtcgtcggcgacggcttctgggtgtagagcgagagcttgtccagcccgcgcagctgctgcgcctccttgaggatgacgacctggtaggatcccatcatcggcatctggcggcagaggttgatgacctgccccgcctcggagtccctgccgtagacggtgagctggttgaaagcccgttcggcttcgcccagcacggtcgtggctatctgctcggcgatggcgtcgatgaagtagctctcttcgcccatgagcaggtagatggggacgaaccgccgtgcggcgatctggccggcgagttgttcgtatgcggcgacggaatccttgaatttcagtacgcttttagccatgtcagacgatttctttggtgatacgcagcacgttctccgtgtcgggcgtcaggcggtagcggtcgtcgatgcggcggccgacgagccatacgatctcgccgcccgacagcagtacgaactgccgctgtttttcggccatcgagaccttggcgtcgatcaaaaaatcgctcactttcttgcgccccgtcatgccgaacggcacgaaggagtcgccttcgcgccagcggcgcagcgtgagcggaaattgtaagcggtcggcatcgacctgggcgatatgctccggtacgccgaaattcttgatcgtgtcgatgtccgtatattcgaagtagagcaccgaattgccgcagtagctccgctgtgcgcccctttccacctgcgtcatgcaggcgtcgtcgggggtgatcggcgccacgacgatggtgccgcggtcgacgtaggccacccgttcgcgcgaataaaagcgtcgccccgtcatgtcgtgccggagcgaatggcagagcgagtcgacgacgtcgcccttgaacccgtaggccgaactcagcaactcgtaaatcacgaactcctgcgggaatgctgggtcgatgcggtcgaggtggatcgtgtcgaacccgtccgccgaagtcaccgcctcgccgcggatacgttcgatgccgtggttgatgaatagctgggcatcggtcaggcgtgccaggttgcggctcatgaggctcgtgaacttggggttgatctcccggatgcgggggatcagtccgagccggatcttgttgcgcaggtatttggtcgagcggttcgacgaatcctcgcggaacgggatgcggttggctacggcatattcgaggatctccttgcgcgaagcgaacatcagcggacggatgatcctgcccacctgcgtcgagatgcccgtcagcccgcgcagccccgtgccgcgcagcaggttgatgaagaacgtctcgatcgagtcgtcggcatggtgggcgatcgccacggccgtgtagccctgcccgcggctcagggtgtcgaaccacgcatagcgcaggcgtcgtgccgccatttccatcgactcgcccgtgcgctccatttcggccgtggtttcgaaccgcttgttgtaaaactccacgccgtacttcttcgcttcctcttccaccagcacctcgtcctcttcgctctcggcgccccgcagctggaaattgcagtgcgccacgcccaccgaatagccgctgcgggtgaaaagcgacagcatgaccatcgaatccacgccccccgaaacggtcagcaggatgcggtcgtcgtgcgtcgccaggtcattctcggcgacatacctctggaaagcctctaaaagtgccatattacaatatgttgacttcggtgtctatctctatgccgaacttttcgtgtacgcgggcctgtaccatgcgggcaaaatcgagtatctcgccgcccgtggcgcctcccaggttcaccaataccagtgcctgccgttcatggatgcctacccgtccgcttcggcagcctttcagccccgccttgtcgatgagccacccggcggcgagtttggccttgcccgaaagggtggcggggtagagcggcatgtcgggccagcgggcccgcagttgctgcgccacggattcatcgacgaccgggtttttgaagaagctccccgcattgcccgtcaccttcgggtcgggtagtttggcgcggcggatggcgcagattgcctcgcggatgttgcgcagcgtcgtgccgccgcgggattcgacttcgcgctccacgtcgccgtaccccagccggggttgcggcgtacgcgaaaggcggatgtctaccgccgtgatgacgacacgtccccgcaggtcgtgcttgaagatgctttcgcggtaaccgaaacagcagtgcgcggcgtcgagcgtcatgcatttgcagttttccacgcagaacatgtgtacctgctcgatcgcgtccttcgcctcgcagccgtaggcgccgatgttctgcacgggcgccgccccggccttgcccgggatcagcgagaggttttcgagcccccacaatccgcgctgtacggcccactccaccaggtcgtcccattcgaccccggcgtcggcgcgcacgtgtaccgtgcccccctcttctccgagcagggcgatccgctgcgagacgggggtcagcagcagcccgtcgtagtcctgtgtgaaaagtatgttgttgccgccgctcaggacgctccagcggtcggggattccgccgccgaaaatcgcgtgcagatcctcctcggtctcgaattcgacgagccgggcggcgtgctgctcgacgccgaaactgttgcgtccgcgcaggctggtttggtgaaattctcggatcatgatgtgcaaagttagaaattatttcgttatctttgaagataattccgatccgacgaaaaactaaagacgatagaaccatgtttaccgaaaaagatttacagcagatcgaaaaacacgggctgactcccgacgcggtcgagcgccagctggagaatttccgccgcgggttccccttcctgaaggttgtgcgcgccgcatcgcccggcgacggggtgatggtcgtgggcgacgcggaggctgccgccgccgtggcgcgttatgaacgggaggccgaccgcctgggcatcgtgaaattcgtgccagcctcgggtgccgcgacccgtatgttcaaggagttgttcgagtttgtcaacgagggtaagcgcggcaagggcatcgacacgttgctggacaatatcgggcgcttcgccttctggccggaactcaaggccgtgctgccgcccgatgccgacgacaaggcaaccgtgcgtgccatcgtaaaggacgggctcggctacgggcagaagcccaaggggctggtgaccttccatgcctatcccgaaggggcgcgcaaggcggtggaggagcacctggtggagggcgcggtctatgccgcggccagaggcgtggcccggatccatttcaccgtgtcgcccgagcacatcgcgggcttcgaaaccctcctggcggaaaaggtacccgtgtacgaacagcgtttcggcatccgttacgacatctcgttctcggtgcagaaaccttcgaccgatacgattgccgtcaatcccgacaacacccctttccggcaggacgacggcacgctgctgttccgtccggcagggcacggcgcgttagtcgagaacctgaacgaaatcgacgccgatctggtgttcatcaagaacatcgacaacgtgacgaccgatgcgcagcgcggcgatacgatccgctataaaaaggtattggccggcatcctgctggatttgcaggatcgggctttcgagtacctcaaagcgcttgaggtgggcggtgccgagctggagccgatcgtggagttcatcgaacagcgtttgtgcgtcaaactgcccgccgactacgattctgccctgttgcgcgccgtgctcgaccgtccgatccgtgtctgcggcatggttcgcaatgaaggcgagccgggaggcggcccgttctgggcttcgaacgccgatggcacgcagtcgctccagatcgccgagtcgagccagatcgcacccgccgaccagccgctgatgaaggccgcgacgcatttcaatcccgtagacctcgtgtgcggcgtccgggattccaaggggcgcaagttcgacctgcggcgttataccgaccctgcgacgggctttatctcgtccaagtcgagcggtggccgcgaattgcgtgcgcaggagttgcccggtttgtggaacggcacgatgtcgcggtggaacaccatcttcgtggatgtgcccatcacgaccttctcgcccgtgaaagtcgtgcaggatttgctgcgtccccagcaccagtgacccctgtgcgaacccgataaggcggatgccgcgtgagcggcgtccgttttttgtggggctgccgccttcccgcggggccgtccgttttttttacggcgccggtgggtttttaccggacagcctgcggcgggcggcgggtttcccggccgtaagacacttcatttcgcttcgaaacttcttctttttgttcttgaattttgtcaaaaaaggacaaattattgcagtgtgcctcagttttctgataatcttttatatatttgtgtgcatattttgaaaaacgataatcaaaactaaataacactatggaaaacaaacttcaggagctgaccaaaaagctctacgacgaggggctggagaaaggccgtgccgaagccgaccgtctggtcggggaggctaagaacgaggcggcgaagatcgtcgccgaagcccgcgcccaggccgaggagatcgtcaagaaggcccgtgacaaggccgaagatgtcgagaagaacacgatgaccgagatcgcactcgcgggcaagcaggccgctgcgaagatcaagtcggagatcgcttcgatgatcgtggccaaggccactgcggccggggtgaaggaggctgcgctcgatcccgcattcatcaaggagatgctgctggccgtggccgggaactggaacggtgccgatgcgggcaaggtggaactgaaagccctgctgcccgaggccgagcgcaccaagctcgacgcggcgttcggcaagagcgcccgggaactgctcgccgccggtatcgaagtgggctattcgaaggaggtgaagagcgggttcaaggtaggtgccaaggacggcggttactacatctcgttctccgatgccgatttcgacgccttgctgggcgaatacctgcgcgagaaagtatcggacatgctttttaaggcgtgacgctatgttcacgacgaattattattgtctggtagccgggctgaaggagtattcgctcgatgccgacaccaagggtttcgatgccaaggccatcgtcggggagatcctcgaaggggtggacggggccgatgccgacgcggtgcggctgttgtacggctattacgactgtgagaatatcgcttcgctgcgtgcggggcgctcggcgcacaatccgctgggtaacttcacacgcgaggagctggaagaggaggtgaagactccccggcgcctgccggcgcccgtagcccgcgtattgcgcgcctttgccgaccccgaaggcgaggatgccgaggaggtcgatacggccgggcgcttcgagactgcgctcttcggggcctactacgatgcctgcagccgctcccggagccgcttcctgcgcgcatggtcggaattcgaccgcaacctgcgcaatgtgacggccgccgtgacggcccgtgcggcggggcggcccgtcgaggaggtgaccgtcggcggaggcgacgtggtcgagcagctggagcgcagctcggctgccgatttcgggctgcggggcgagttgccctacatcgacgccgtgatcgctgccgtgaacgacgaggccaacctcgtggagaaggagcacaagatcgacctgatccgctggaacgaagccgtggagctggcgacgttcgactatttcgacattaattccatcctgtcgtacctgtcgcgtgtcaacatcgtggcgcgctggacgcagctcgatgcggtgcgcggacgcgagatgttcgagcgtttgatggccgagctggatggcaaagggctgatagaaaataaacaataggataattcatgaaaactacaggacgtgtaaatggtatcatctccaatatcgtgatcgtcaaggccgacggagccgtgggccagaacgagatctgctacgtgtatacgggggataccaaaatgatggccgaggtcatcaaggtcgtaggcgacagcgcctatgtccaggtttttgacagcacccgggggctgaagatcggcgacagggtcgagttcgaggggcatatgctcgaagtgacgctcgctccgggcctcttgtcgcgcaactacgacggtctgcagaacgacctcgaaaagatggacggcctgttcatcgcgcgcggttcgatcaccgacccggtcgatttctcggccgaatgggagttcgccccgctggcgaaggcgggcgacaaggtctcggccgcatcgtggctgggcgaggtcaaggagcagtgggtgagccacaagatcatggtgcctttcacgatgaccggcaattatacggtcaagagcatcgttgcggccgggaaatacaaggttacggacacggttgccgtggtgacggacgacgaaggccgggagcacgggatcacgatggtgcagaaatggccggtgaagcaggccgtgcgctgctacgtcgagaagccgcgcccctcgcgtgtgatggagacgggcgttcgtgccatcgacaccttcaatccgatggccgagggcggtacgggttttattcccgggcctttcggtgccggcaagacggtgctccagcacgctatttcgaagcaggccgatgccgatatcatcatcatggtggcatgcggcgagcgtgccaacgaggtggtggagatcttcaaggagttccccgagctgatcgacccccgtacggggcacaacctgatggagcgtacgatcatcgtctgcaatacgtcgaacatgcccgttgcggcgcgtgaggcgtcggtatatacgggcatgacgatcggcgaatactaccgtgccatgggtctcaaggtgctcgtgatggccgactcgacgtcgcgctgggcacaggcgctgcgcgagatgtcgaaccgcctggaggagcttcccggacaggacgctttcccgatggacctttcggcgatcatctcgaacttctactcgcgggccggcctggtgaaactcaccaacggggagaccggttcggtgaccttcctcggaacggtgtcgcccgcgggcggtaacctcaaggagccggtgaccgaatccacgaagaaggcggcgcgttgtttctacgccctttcgcaggggcgcgccgactcgaagcgctacccgtccatcgacccgctggattcctactcgaaatatctggaataccccgagatccgcgaatacctcgacgatcatatcgagaaggattgggtagacctcgtgtatgccggcaagaccatcgtgcagcgcggcaaggaggccaatgaccagatcaacatcctgggtgatgacggcgtgccggtggagtaccacgaacgtttctggaagtcggagctgatcgacttcgtgatcctccagcaggacgctttcgacgacatcgatgccaactgtccgatcgagcgccagaagatgatgtataaaatggtgctcgacatctgccggaaggatttcgccttcgccgatttcgaagagtgctcgcagttcttcaagggtcttatcaacctcttccgccagatgaactattcgcagtggcagtcggagaagttcaacggctacctgaagcagatcgaggagtatgtgagtgaaaaaacaaaataagctttagaccatgacaacacgagcttttcagaaaatatataccaaaatcgacaacatcaccaaggcgaccgtgaccctgcgggcgcagggcgtcggcaacgacgagctggccaccgtgggcggcaagctggcgcaggtggtgaaaatcatgggcgagaacgtgacgttgcaggttttcgcaggtaccgaggggctggctaccgactcggaagtggtcttccacggcgaacctcccaagctgcgcgtgtcggacaacctcgcgggacgcttcttcaacgcctacggcgaaccgctcgaaggcggtgagatcgtcgagggcgaggcgcgcgagatcggcggcccgacggtaaacccgttccgccgtatccagccttcggagctgatcgccacgggtattgccggtatcgacctgaacaacacgatcgtgacggggcagaagatccctttcttcgccgaccccgaccagccctataacgccgtaatggccaacgtggcgctgcgtgccaaagccgacaagatcatcctgggcggcatgggactcaccaacgacgacttcctctatttcaagtcggtgttcgagaatgccggtgcgctcgaccgtatcgtgtcgttcgtcaacacgaccgagaacccgcccgtggagcggctgctcgtccccgacatggcgctgaccgccgccgagtacttcgcggtggacaagggcgagaaggtactcgtcctgctgaccgacatgacgctctatgccgatgcgctggccatcgtgtcgaaccgtatggatcagatcccgtcgaaggactcgatgcccggttctctctactccgacctggccaagatctacgagaaggccgtgcagctgcccaacggcggctcgatcacgatcattgccgtgacgaccctgtcgggcggcgacatcacgcacgccatccccgacaacacgggttacatcaccgagggccagctgttcctgaggaacgattccgatacgggcaaggtcatcgtcgacccgttccgttcgctgtcgcgtctgaagcagctcgtgatcggcaagaagacccgcgaagaccatccgcaggtgatgaacgcctgtgtgcgtctgtacgccgatgccgccaatgccaagaccaagctcgagaacggtttcgacctctcggactacgatgagcgtacgctgaagttcgcatacgactattcggagaaactcctttcgatcgacgtcaacatcggcattaccgagatgctcgacacggcatgggggctctttgccaaatatttctccaaggaggaagttgcgatcaaggaggaactcatcaaaaagtactggaaagaagcgtaaggcacgatggcaatcaaatttcaatataacaagacctcgctcggcgacctcggcaaacagctgaaaatgcggcagaaggcgctccctacgatcaaaagtaaggagtcggccctgcgctccgaggtgaagaaggcgaaggactccgcgggcgattaccgccgtcggctcgatgccctgaaggccgagtacgactacatggtatcgctctggggagagtttgattgtgacctcttgcgcatcgctgatgtcgaactttcggtacagaagatcgcgggtgtgcgtacacccgtcttgcaggacgtgaaattcgaggagaagccctacgacctcttctcgtcgcccgtatggttcgccgacggaatcgatatcctcaagcgcatggcgcagctgggaatcgaattcgaggtgtataaccgcaagatggagttgctggatcacgcacgccgtaaaaccactcagaaggtgaacttgtacgaaaaggtgcagatacccgggtacgaggacgccatacgtaagatcaaacgcttcatggaagacgaggagaacctttccaagtcggcccagaagatcgtgaaaaccaaacagcaacaggccggggagggcgcgatgttatgatagcgaaaatggcaaaatacgactttgtgctctatgcggcccaaagtgaggattttatcgggaagctgcgcgaactgggccttgtcgacatcacgacgacgggctgggagccttcggaggaagaccggcaactgctgctcgatatcgaggggcatgcgaaggccgccgacttcctgcggaatttccgtgccggggaaggtcgtttcaaggccggtgcgaaacccttcgcctcgggtgccgaggcctatgagcactatgtcgccgcacaccagaaggccacggcgctcgccgccgagatcggacgcctggagaaatcggccgacgagctgcgtccgtggggcgagttctcgcccgagcgtacgaaggcgctggcttcgcagggcatcgtgctgcgctatttcttcaccccgaagagcaactacgacaagttcgggcccgagtggtcggaacgctatatgctttcgctgatcaaccgtaccgattctacggcctatttcgttgccgtgacggccccgggcgaggatgtgacgctcgatgcgcaggagatgaaggctccttcgatggacttccgcgaagcggaacgccgtatcgccgaggcggggcaggaattgcgggcactcgacgctgaattctcgcgcgtggcggcgtcggagaagttgcttgcggcgcacgctgcgcaactgaaggagcgcttgcagggcgtgcgcgtgaaagccacggcgcagcaggccgccgacggtacgctggtcgtcatggagggctgggccgagaaggagacctccgacaaggtcgacgccctgctggaagcgtatcccaacgtcgtttatctcaagggagaccctacgcctgaggacgatacgcccgtgaagctcaagaataaccggttcgcgcgcgttttcgaactggtgggcgacatgtatgcccggccgaaatatggcacgatggatctcacgccgttcttcgccccgttctacatgcttttctttggcatctgcctgaacgacgccggctacggtgccatcctggcactcctgggagcctggatgctctccaggaaccgcaagcccggcatgatgcgccaggctgcgtggttcgccacgctgtgcggcgtgatgacgatcctcttcgggctgctgtgcggttcgttcttcggcatcaacatgtcggaatggttcccgtcgatccatttcttcgatttccagggccagttcttctcgatcgcgctggccatcggcctcgtgcagatcatgttcggcatggtgctcaagatcgtcatgatctcgtcgaccgtcgggttccgctattcgctcggttcgctggggtggctgctggtcattttgggcgggagccttgccgccggactgccgatgctcaactccgggtgggtgatcccgttctacaccacctcctcgcccgcgttctatgcgacgctcggcgtgggtgcggtgctgatgctgttcttcaattcgccgggcaagaacccgctgctgaatttcgggctgggattgtgggatacctataataaccttacgggcatcctctccgacgtactgtcgtatatccgtctgttcgccatcggcctctcgggcggtatcctcgccacggtgttcaatgcgcttgccgccgggttcgtgcccgaaggttcgggcatcgtcgtgcggctgctgatcatgatcccgatcctgctgatcggccacggcatcaacctcttcatgtcgaccatttcgtcgttcgtgcacccgatgcgtctgacgttcgtcgagttctacaaaaacgcgggcttcgaaatgtcaatgcgttcgttcgagcccttgcagaaaatagataattcggaaaacaaataacaactaaaacaaattaaaattatggaatcaacaactgcaattattttgggctatctcggcgtagcgctgatggtaggcctttcgggcgtagcgagctgtatcggtacttcgatcgccggtatggcatcggtaggcgccatgaagaaaaacggcggggctttcggtagctacatgatcctgtcggctatccccggttcgcagggcctttacggtttcgtgggctacttcatcatcaaagggttccttacggattcgatgacgttgttgcagggggccgccatcttcggcgccggtctgctgacgggtctggtctgcctcgcttcgtcatactaccagtcgaaggtgtgtgccaacggtatcgccgcaatcggcaacggccacgatgtgatgggtaagacgcttatcctcgcggcattccccgagttgtacgccatccttacggtggctgccgtgttcctgatcgcgggcgcgatctaaacggccgcagcggcaaatcgctccgcagggcgggacattccggtgtcccgccctgcttttttcaggggtgtggcttgaattgtacttttattgcatgaattgatacttggcgaaacctcgggaatgtgtaattttgcattgactcgaaagttccgggcgattgtttttccgtcgggatgggacagttacaagtttttaagtggtataattagggattcaggcccggctgcaagtgcagccgggcctgggtttttagactggttggcgggaaccgccgtctccggtcgggcggacagggattcctgtattgccgggaacccccgccttatgctttttcctgtggcccttcgggcagttcgtcaacctcctgtttgatctgggagagcttctccttgcggtataccttgggggtgcagccgtatttggcggcaaagcacttgaagaacgtgccccggttgacgaaccccgccttgtagatgatctcgtcgatggagagcttggtcgaggtgagcagctgctcggctttggccagccggtactccttgatgatgttggtcggggtctggttcaggatgccttccaggcggcggtagaggttgcggatgcttacgcccatctcgtcggcgatgaatttcgtcgagatctccgtgttggaaatgttgtcgttgatgatcttcagcatcttgtcgatgaactccttatcgtcctggtggagcatcttgccgtcggagagttcgaaggcgctgatcgacgatttgtaatagtccttgagcgagcggttgcgtttgagcaactgctcggtcacggccttcaggtattcgacgttgaagggcagcgtcaggcagatgtcggcgccggattctacgcccttgatgcgttcgtcgacctgctgtgccgtcgagagcaggatcaccgggatatgcgaggtcagcttgccctccttgatgaacttgatgagcgacaggcagtccgatttctccgagagcgcatcgcagatgatgatgtcggggtgcatctgtttgagcagttcgatcatcgcgttcaggccgtcgggcattttgatattgtagtccggggcaaacagctcggccacgaaattcatgatctccgaatcgtcgttgaccacgaacatcgtccggcggttcttgtcgaacgtgaattcgcgttgcgtgacggtcggcagcggcagcccgtagttcgtgtcgatcggcacgatgttgtcgttcacggacgtgttctcggcggttactttcagccgcggcagccgcacggtgaacgtcgtctgggcattgggggtgctttcgaccgtgatccggccgtgcatgcgggtcacgatgctgtggcagatcgccagccgcaggtcgccctggaacgaaagcccccgttcgctcttgcgctcgaaataatccagcacgcggtaacggtcgaaaatggcctcgatgtcgtcgaggttgaccccgatgctgtcgttggcggccgatatgaacagttccccgtcgtcgttgcggatcgtcaggctcaccgagccgttgtaaggcgtgtgcttgaatgcattggacaacagtgtgttgaggatcgtagaaagcccttcccggtcgctcggccatgccaggttgcgctcgatgtccagcttgcagtggatgctgttctgctcggagtattcgccgaaggtctccgcgattccctgggcgatttcggccacgggtaccagctcgatgttttcattctcatcgttttgcgaggtgcggataccgcggaactcgtggagcatgtagatcaggtcgtggagcttcgacacgttctgccggatggtctgcgcgtatttgaggatgtaggagtccgatttacggtatgtcatgatctgctggcagggccccgagatcattgtcagcggcatggacaactcctgcgtgatgttcgagaagaatcgcattttcgattcgtagacctcctctttgcgccggctttcgaggcgttgcagctgttgggccttgcgttgccggtaacggagcaggtaataacgcagggtcatggtgacggcggccagcgccagcagcatgtagagcagctttgccaggaatgtggcgtaccatgccggtttgaggcgtatttccagtgaatagacgggacttgtcgccccggtgatattattgcggtagcgtacgtcgagccggtaggtgccgggcggcaggtcggcgaaggacagcttcgacgaagtgctcgtccattggtcgctgaacccgtccagccgcgtgtaataggtgtagttgctgccgttgacgtagtcgagtgccgataccgtgatctcgtagatgcgctgcccgtgccgcagcgtcagcgcgcctttgtcggagagcaggttgccgatgttgtgcaccccgtcgttgaggcgcacgtcgcggaagaggatcggcgggttgaacgactgttcctcgaagccggtttcctcgacggtgaccagcccgttgatgccgccgaagaagagcagccccgtctgcgggtcggtgaagtaggctccgtcgctgtattcgatggtattcaggccgtaggagtacccgtaggtcaccacgttgcccgtgtggggcgtgtactgcaccagtcctcggttggtgctcagccagaggtcgcccttgcggtcgtcgaggatgccgtgcacggtgttggtgatgcccgggatgagcgtcgtgtcgcgtgcgacctgtatcagtccgccgctcgtgccgaaccagaggctcttgtcctgggtctggtggatcgtgaagatgtcgttgacgatggcgctgcggttgtggtcgaatttggcgatctggtgcgtattcgtatgcgtgttgtagcgtacggccccgcctccgcggttgccgaaccacatgatcgaatcgttctgctcgtagagggcgaagaagaattttttgacctccagttcctcgttgaagtggagtcgcttgacctcgcggatttcaggatgggtctgcgatccgcccagcgtgatgcggaatataccgcagcctaccgaagccacccacagggtgtccggcgccgtctcgcgcagcgtgtggatgaaccgcatctcctcggggacgccgaggcggtggatcctccggtcggcataggagtagtagttcagcccgtcgccgtcggtgccgatccacagcaggttgcggctgcttgcggcgaaagtgtagaccgagttgtccagcagatcgctgttggccgtggttttctgttcgacatgggctgcgtcgaaggtctttctgtcgtagaagttggggatgcgcaataatccttcgcccttggttcccacccacaggctgcgttcgtggtcgacgtagagcgcacgcacgggcttcgaaaggttgtagggcaggtcgttgaaggtgatcgagcggaaagccaccgcattgcgcgtgtactggtaaagcccctgcccgtcggtgccgatccatacgatctcctgccgggcatcgcgcagcagcgtcatggcgccgcaggtgatgttgatgtgctccgtgacgtattttacgctgttttggggggtggttttcagacggacgacgccgttggtgttgaacgacacgaggtaatcgtctccgtcgctgatgatgcgggacacctgtcccatggcggccagctcctcgcgcatatcctttatatatatgatctgacggcttttgatgtcgaactcgtagaacactttgttccggtcgatgaaataaaccctgttcccttcgcggaatgcgaattccgggagcgaaggcagggctatctgctgtgtttcgccgaaccggatgtccccctgcccgtcggcgggaattttcaccggcatacagaaaatacccttgcgtgaaaagctccacaggttgccctcgtcgtcgagcaccatctccaggatgtcggcataccgcccttgctgcatcggccttgtgggggcgaattcatggcgtgtgcggtcgtagtagctgaatttgttgtcctgcgtgatgacgatcacctcgtcgctgctgcgggtcacgatccggtacattccctggaaacaggtgtgcggttcgacgtgcttgctgtccggatcgaacaggtcgagcccgtagttcgtgcggatccagaaaagcgagtccgtcgtcacggcgatctcctcgatgaggttgcccgacaggggggtgtattcgccccagtcgttcgggaagaggcgcatgcgttcgccgtcccacatgttcagcccgtcgcacgaaccgacccagataaacccgtgtttatcctgtgccagcgagaggatggcgttgttcgatatgccttcgcggctcgatatctgccgcaggttgctggcttgtgccgccgcacagcacagcaggtgtatacagaccaggtagattattcgtttcatggagggttgcggtttgtggaaattttatgttggttgtgcaaatttatgcaaattttttcgtaaaaacagactaaccattgccattttgggcatgaaaacagacatatttcttacctttgtctccgggaaatcccctctggagcctctgtcccggcggtgggaggtggcaaaaaccggaatattttgtgtttggcacggatgtgtactatttcttcatggatacggactgccgatcattccgggtttcctaattttgttagcggaaaacctaaaaaccttattgccctatgaaaaaaatcgtactcctgtcactggctgttttcgcggcgctttcgctctcagcccagcaaccccgcgactgggcgcagtacgggcgttacgaacagcagaatgccgcactggcgggtgaatccgtcgaagtggtcttcatgggcaattccatcacggacaactggatcggggccgatcccgatttcttcgcccgcaacggcttcgtcgaccggggtatcagcggccagacgaccgccgagatgctcgcgcgtttccgccgcgacgtcatcgacctgaacccgaaggccgtggtgatcctggccggtatcaacgacattgcgcagaacaacggcgccatcaaactcgaaaacgtcttcggcaacatcgtctcgatgtgcgaactggccaaattcaacgggatccgcgtggtgctctgctcggtgctgccctgcgaccggttttcgtggcgccccgagatcaaacctgcggcagccgtcgcggagctcaatacgatgctcagacagtacgccgccgaacataagatcccctatgtggattaccatgcggcgttcgacaacggttccggcggcctggatgcccgtttctcccaggacggctgccatccgaccctgtacggctacacgctcatggagccgatggtcgtcgaggggatcaacaaggccctccgtacgaagcaggcgcggtataccaccccgacacccaacgaataaccgataacagataatgaagaaaacactcctcctcaccgctgcggcagttgccgcatgtgcttttgccgcctgtgaccggacgtcgccgagccaggcccgcaacctcgaccgtgccaaggcaacgctcgattcggtctatgcttattatggtgtcgccgaccgctgcctgctgcgcgaaaactatccgttcaatgccggttacaaggcggggtaccttgcctccgaagaccaggcgcgtccgaatccctattcctacctgtggcccttctcgggaacgctctcggctgtgaatacgatcctcgaggaggatgcctcctatcgcagcgtgctcgacaaccgcgtgctgccggggttggccgagtacctcgatacgacgcgtatgccggcggcttatgcctcctatattaatacggctccggcctcggatcgtttctacgacgacaacgtgtggctgggcatcgacttctgcgatatctacgaggctacgggcgacaagaaatacctcgcccaggccgagatgatctggaaattcatcgagagcggcacggacgatgtgctgggcggcggcatctactggtgcgaacagaagaaatattcgaagaacacctgttccaatgcaccgggcaccgtctatgcactgaaactctatgccgcgacgggcgacagccgctacctcgagcagggcaaacggctctatgcctggacgaaggagcacctgctcgacaccggggacgggctctatttcgataacgtgtcgctcgacggcaatatcggccgtgcgaagttcgcctacaacagcggccagatggtacaggcgggtgccctgctttacaaggctacgggcgatgaaagctacctgaaagatgcgcagcgcacggccgccgcaagctacgattatttcttcgaggaattcacgcccgagggcggtgaggcattccgtatcatccgcaagggcaacgtgtggttctcggccgtgatggtacgcgggctcgtcgaactctatcgcatcgacggcaatgccacctatgtcgatgccgtgcagcgcagtctggactatgcgtgggatcatgcgcgcgacgggcacgggcttttcgaaaccgattttacgggcgcagacaaacaggccgagaagtggttgctcacgcagggtgccatggccgagatgtacggccgcatgtccggcgtcggactgaaataatccccttgcagcatggacatgcccgggccttacgaataaaagaaaccagtgaagagatttctcgccataacgctcttgacgtgctcgtttgccgcttgcggacggtgcggtgcgaccgcgcccggcaatctcggccgtgcgaaggcgacgctcgattccatctataaatggtacggggtggacggcagtttcctgctgcgcgaaaatcaccctttcgatgcggactacaaggccgggtatttggcagaagggcaggccgccccgaacccctattcttacctgtggcctttttcgggaaccctgtcggctgcgaccgcgatcctcggggccgatccctcgtaccgcagtgtgatcgacggccgcatactgcccgggctggcgcggtatctcgatacgacgcgtatgcccgtggcttacgccgcttatgtcgatgcgggatccgaccgtttttacgatgacaacctgtggctgggcatcgacctttgcgatatttacgaggccaccggcgagaggaagtaccttgccgaagcggagcggatatgggagttcatcgggagcggcatggacgacgtgctgggtggcggcatctactggtgcgagcagcataaggattcgaaaaatacctgttcgaatgccccggccgcggtttatgcgctcaaactctatgccgctacgggcgaaaggcactacctggaacagggcaaagccctctatgcctggacgaaacggtacttgtccgatcccggggacggcctatactatgacaacatggcgctcgacggtacgctcgttaagaccaagtattcttgtaacagcgggcagatggtgcaggccggtgccctgctccataaggctacgggggacgaaagctacttgaaagacgcgcaacgaaccgcagcggcaagctacgggtgcttttttaccgggttcacgcccgaagacggtaccccgttccggattttaggcaagggtgacgtgtggttctccgccgtgatgacacgcggcttcatcgaactttaccggattgacggcaatgccgagtacctcgaggccgtgcagcgcagcctcgaccatgcgtgggtgcatgcacgcgacgggaaagggttgttcggggcggatctcacgggccgcgtgaaagattcccggaaatggttgctgacgcaggccgggatggccgaaatgtatgcccgtatggcaaacctgaacttgaaataaaccgaaaaacctataacctgatgaaacgaaagatcctcttcacactattggccgcggtgttcgccgcggggatcgcctttgcggaaaagttgcccgtggcaaaggctgtccgccctgaaaaagagttgtataaaacattcgctaatcccgacgggcgccatcgtccctatgtgcgctggtggtggaacggcgcccgtgtgaacgagcaggagatcctgcgcgagctggacgtgatgcgtgatgccggaatcggcggtgtggagatcaacaccatccagttccccgaccagaccaccgatacggtggggtgtgctgcgctgacatggctgagcgacgagtggatccgcatggtcaacgtggctgccgacggctgccgtgagcgcggtatggtctgcgacatcatcgtcggctcgggctggcccttcggcgcagaataccttgcgcccgaggagcaggtgcagatgctctatcccgttacggtcgatgtcaagggcgggcggtttaccatcggccgcgacgaggtgctgggcatggccaacgcccatgtggccaatccccgcagcaacccgaccaaggagcttatgttcatccgcctgatgcccaagcatgtcgcccatttcaccgagggcgtttcgtacgacgaacaggccggcaatgataccatcacggtcgatgtccccgagggcgaacatgttctctactttttcgtgaagctgaacggctattcgcgtgttatcctgggggctccgggcgccagcgggcccgtggtgaaccacctcgacggcaaggccgtggagcgttacctcgataaattttccgatgcgatgcatttcacccgcggcaaactcaagggggaaatccgcgcggcgttctgcgacagtttcgagctggaaggcaacaactggacgcccggcatgttcgccgagttcgagaagcgtatgggttactcgctctatccgttcctgccctatgtgttccagcgtaccggagccatgggcgaacccgtccgtgaggcttacggctgcagtttctcgcccgaagtgacgcgcgacgtgatcgagcgtgtccgccacgatttctggcacgtgcagatgcagctcttcaaggagaacttcatcgacgtatacaatgcgtggtgccatcgcaacgggctcaagtcgcgcatccaggcctacggccaccagctccatcccatcgaaacgtcgatgtatctcgacatccccgaatgcgaatcgtggatacacgacggtatcggccgggtgatggagcccaaccagtacctttcgggacgcggttacagcatggtcaacaagttcgtcgcttcgggggcgttcctggccaaccgcaacatcgtgagctgtgaagagcagaccaacgtgggcaatatcttccagaccacgctcgaggaggtcaaggtgacgggcgaccgcagcaacctttcgggcgtgaaccactcggtgctccacggcttcaattacagcccccgccagaaggatttcttcggctggatacagttcggtacttatttcaacgagaacaatacgtggtggccttatgtgcgtccgtggatggattacaaggcgcgtgtctccgccctgttgcagaacagcgtctatcaggccgacatcgccatcctgccgccgctcgaagacctctggtcgatccacggcatgcagcgcgacccctatcccggcgtcacctatcccgcctatgccaacgacctctgggaggccgtccagcagagcggcaacggctgcgactatgtcagcgagaaggtcatctgtcagtcgtctgtctccggcggccagctccgcttcggttcgcgcagctacaagaccctgttgctgatggaggtcgagagcctcgaaccccggaccgctgcgcgcatcgctgacttcgtggcggcgggcggacgtgtgatcgccatcgggaaggtgccccacaaggggctcggattccgcgatgccgcggcgaaggatgcccgtgtgaaggcgatcatcgaccgtgtcgtgacgacctggcccgaccgttttgtccgtgtcgatgccccgcagggggatatgctcggctggtaccgcaccttgcaagcggaatacggcctgaccccttatgcgaaaatctccgcccccgaccgttttatgatgatgaactattacaagtcgggcgacaaggatatctatttcgtcgtcaactcttcgatcgaacgttccatgcagacccggctcgaattccccgccgaggtggcggtcaagcaggcctgggtctgggatgccgagacgggcgggcggcatatgctcgacatgcggaacggtacgctggagttgtgcctgacgcctgccgaggcgaaattcatcgtcttcgagaaagaccgcggtggccaaatgctgcccgcacctgcaccccgcagcgcgaaccccattgccctcaacggcatctgggatgtcagggccacgcaccatgtggataagagtacccgggaattctccctgaccgacctcgtggatctgcacagcctgccgttcccctggttgcagagcttcgccggcaccatcgaatacacccgcacggtcgatgtcgaagatccggcggcctaccatacgctcgatgccggccttacgcataacggcatcaccgaacttttcgtcaacggcgagcccgcgggcatacgctggtacggtgcacgtacgttcgacgtagcgggcaaactccgtaagggcgcgaacgtcctgacgatccgtgtcaccacggtgctgaccaactatgccaaggcccgtgccgccgacactccgacggccgcccgctgggaatgggcgcagcggctcaataaggaactcggcctgcgcggccccgtaaccctgtactgataacttaaaaccctaataaagtaattctgtaaacgactatgaaaaacaaaaacatctcccgggcttgccttgctgcggccctcgtcatggccggtacggtttcggcacacgcctcggcgctccgcagcagtgctccggaaaccgaagccgcggttatgattatggacaatacgcgtatggccaggcccaaagcgaagatcgtaaaagaatatgccccgaccaaccgtccggccgagtccgagcgtctgttccgctccgaggccgtcgaggccgagatcgcgcgcatcaagggcgtgctctccaatgccaagctggcctggatgttcgagaactgttttcccaacacgctcgacacgacggtgcgctaccgcaaggacgacaacggcaaggacgacacggtggtttataccggagacatccatgccatgtggctccgtgactcgggtgcgcaggtgtggccctacctccagctggccaacaaggacgagcacctgcgcagtatgctggccggcgtgatccgccgccagttcaagtgcatcgagctcgatccctatgccaatgcgttcctcgacccctacgacccgaaccccgaccatcagtggatgagcgaccagacccagatgcgccccgaactgcacgaacgcaagtgggagatcgactcgttgtgctatccgttgcgcctggcctatgaatactggctggtgacgggcgacgattcggtgttcgacgaacattggatggcggccgtcaggaacattctcaagacgttccgtgaacagcagcgcaaggagggtgtcggcccctatacgttcatgcgtgtgaccgaccgccagctcgatacggtctgcaacatgggcaagggcaatccggtgaatcccgtcgggctgatcgcttcggtattccgtccctcggacgatgcgacgacgttcctctttctcgtgccttcgaatttctttgccgtgacttcgctgcgcaaggctgccgaaatcctgaccaaagtcaacggacaggccgccttggctgccgagtgcaccgaactggctgccgaggtggagacggcgctcaagaaatacgccacctacaaccatcccgaatacgggacgatctacgccttcgaggtcgacggttacggcaaccgtttcctgatggacgacgccaacgtgccgagcctgctggcgatgccttacctgggcgatatggacgtgaacgatccgatctaccagaatacccgccgcttcgtgtggagcgaggcgaacccctacttcttccgcggttcggcgggcgaaggcattggcggcccgcatatcggttacgacatggcctggccgatgagcatcatgatgaaggcctttacctcgcaggacgatgccgagatcaagcgctgcgtagagatgctgatgaccaccgatgccgggacgggcttcatgcacgagtcgttcaatgtgaacgacccgacggatttcacccgctcgtggttcgcttggcagaacacgctgttcggtgagttgattctcaagctggtgaacgagggtaaggtcgacctgctgaactcgattacggtaaaataacaggttcgtttttttcaggagggccgcgggaatatcgcggctctcctgtcgtttttttgctatctttgtatccgacctaaattattatattatgaagaaacgacttctggcattgttctgcgcattggctgtgggcggtgccgttacggccaagaccgtcggtgcgacgtcgcccggcggaaacctccgcatggaaatcgaggtggcagacaagatcagttataccgtctggagcggtgcggacaaagtcctcgatgcctgtacgttgtcgctgaccctggcagaccgtacgctgggcgaggctccccgtctgcgcagcgtgaaacgctcctcggccgacgagatgctcgaacgccgcaacccgaccaaggatgccatcgtccggaactgctataatgccgtgcaactcaggttcgccggcgactacgcggtggagttccgccttttcgacgacggtgtggcctaccgcttcgtcacctcgctgcccggcgaggtcgaggtgctcggcgaagagtgccggctgggactgcccgccggaagcgaggcgtggctctccgaggtgaacggtttccgttcgatgtacgaggagccctacacccgtgtggcgatgtccgggtatgccccttcggacaagatgagctacctgcccgtgctggtcgggatgccggggggcaagaagctcctgctggctgagtccgatgtacgggactacccctgcatgttcgtcaggagcgacggacggggcggtttcgaatcgcttttcccgcgcgtgccgaaggagtacggccccgatggcgaccgcagcctgaaggtgctctccgaagaaccctatattgccaggacgcaggggacgcgcactttcccgtggcgccttgccgtcgtggccgaggaggatgccgacctgatcgaaaacgaactggtgtggctgctggccgctcccgctgccgataccgactgggagtgggtgaagcccggactggtgagctgggattggtggaacggcatgcgcctgtcgggggtcgatttccgtgccgggcgcaatacggagtcctatcggtactacatcgacttcgcagccaaatacggcgttccctatattatcatggacgaaggctggtcggcatcgacgaccgacgtattccgtcccaatcccgacctcgacctgcccggcctgatcgcctacggcaaggagcgcaacgtgcagatcgtgctgtggctgacatggctcgccgtcgagaaggacatggaacgccttttcacgacgctcgaagagtggggcatcccgggcgtgaagatcgacttcatggatcgtagcgaccagtggatggtcaactattacgagcgtgtgaccaagtgtgcggccgatcatcatatcttcgtcgactggcacggctcctatacacccaagggccttttccgcacctatccgaacctgctgacctacgaggcggtgcttggcatggagcaaggcggccgctgcaaacccgacaacagcaattacctgcctttcatccgcaatgccgtcggccccatggacttcaccccgggcgggatgttctgctctcagcccgaggataaccgttcgacgggttcgaacccgatggcctcggggacgcgcgcttaccaactggcactttacgtcgtcttcgaaagcccgttacagatgatggccgacaacccggtctattattaccgcgaacatccctgcacggagttcatcgcctcggtgcctacgacctgggacgagctgcgcgtgctgcgtgcacggtgcggcgaacaggtcgtcatggcgcgccgcaagggcgaccggtggttcatcgggggcattaccaacaaccggccctattccaccgaggtcgcgctcgatttcctgcctgccgggcgcagttatacgatgacctcgttcgaggacggtgtgaatgccgacctgcaggccatggattacaagaaacgtgagcggaaagtcgatgcttcgaccgtcgtgaagatcgacatggttcgcaatggcggctgggcggccgtaatcgaataggcgtgcccgggccggagtccatccgcgatcggtaggcggacagtgcccggatttgccgtaaaaaaacgaaaggaaatgcgttattcgcacttcctttcgttttttcgttcctgtgtttttcctggcgagcccgggagggtttcaggcctgcggggcatattcccgcatccggtacagctggtcgcgcaggcgaggggtgaaacccgcctcgcggatggctttgcggatgccctcggcgtcgaaacggttgtgcgctccggccgaggagacgacgttttcctcgatcatgatcgaccccatgtcgttggcgccgctgtgcagggcggcttgtgccgtggccttgcccacggtgagccacgaggcctggatgttgcggatattgcacaatacaaggcggctcacggcgatgatgcgcaggtattccaacggagagaaccgtgtcgttaccccctggcgttccaattcggtgcccgtcgaccggaagatccacgggatgaatgcgatgaacccgtactttccttcggggcagcgggcctgcaggtcgcggatacgcagcaggtggtctacacgctggtgcggggtctcgacatggccgtacatcatcgttgccgaggtcggaaggccgaggcagtgcgcctcgtgcatcacgtcgagccacttttcgaccgacggcttggcgggcgatatggccctgcgtacgacggggtcgaggatctcggcgccggcgcccggaagcgagtcgagcccggctgccatcaggcggcgcagggtctccagggtcgtcaggccgctgatgcgggcgatgtgcgccacctcgggcgcacccagcgcatgcagccgcagcgtggggtagagcgctttcaggtcggagaaaagccgctcgtagaagtcaatgcgcagttgcggatgcaggccgccctgcaacagcagctggtcgccgcccagctccagcgtacggtcgatcttctcgcggtattcggccagcgtggtgacgaatgcccggtctgtctggtggggcttgcagtggaaattgcagaaccggcaacccgagatgcagacgttggtgatgttgacattgcggtcgatctgccaggtcaccacctccgggtcgggaaccacggcgcggcgcacctcgtcggccacgagcgccagctcctgcaacggagcctggtcatagagccggtaggcctcctcgcgtgagagcggctcccttcgccggcatttgtcgtagatgcgttgcacggctatcggtttttacggcgggtgctgcggcgtaccttcgggccgtcctcgcggggtgcgggggccatgggacgaccgttgtctatcagcagctcgaaatcgagctggcgcttctgcaggtcggcacgtttcacgcggatgcgtacggcgtcgcccagcgtcatgcggcggcctgtcgagcggccgacgatctcgtaattggcttcgtcgaactggaagaaatcaccttcgatgtcgcgcaggaacgacatgccctcgatgtgggtttcgtccagctcgacatagatgccccattcggtgagccccgaaatgtggccgtcgaactcttcgccgatgcgctccttcatgaattcgaccatcttgtatttgatcgaggcgcgttcggcctcggaggcgatcacttcgcgttccgaagcgcgggcgcacagatcttcgagcgtcgtcttgtctgccgccttctcgcctgcgaggtaatgcgccagcaggcggtgcaccatcatgtcgggatagcggcggatgggcgacgtgaaatgcgtatagtaggggaatgcaaggccgtagtggccgatgttgtcggtcgtgtaaaaggcttttgccatcgaacgcacggccatcgtcgacacggcgttctcctcagtcgaacctttgatttgggcgaagagcttgttcagctccttggccacggcacgcccgctcgtggccttgaagatgtgcccgaagcgcaggatgaactgccggaaacggtcgagcttctcttcgctcggcttgtcgtgcacgcggtagaccatcgtgcgttccacggtgcgccccttgtcggtcttgcgcttgccgcagaactcggcgacacggcggtttgccagcagcatgaactcctcgatcatctggttcgattctttctgctccttgaaatagacgccgatgggcttcccagcctcgtcgagttggaatttcacctcctcgcggtcgaagctgatggctccgttcttgaaacgctccctgcgcaacgcctgtgccagtcggttgagggtcagaacctcttcggcgaaatcaccccggcccgtttcgatgatctcctgcgcctcggcataggtgaaccggcggtcggagtagatcaccgtccgtccgaaccattcgtcgagtatctccagcccttcgttgatcgtgaataccgccgagaaacagaggctcgcctcgtgcgggcgcagcgagcagagctcgttcgacaaccgctcgggcagcatcgggacggtgcggtctaccaggtagaccgacgtgccgcgttcgacggcctcgtcgtcgatcaccgaatgcgggcgcacgtagtgcgtcacgtcggcgatatgcacgccgatttcccatacgccctccccgaccttgcgtaccgaaagcgcgtcgtcgaagtccttggcgtcggccgggtcgaccgtgaaggtcgtcacattgcggaaatcgcggcgccgggcgatctccttggccgtaatccggccgtcgataccctccgccgcctgttcgatctcgggctcgaagcggtagggcagttcgtattcggccaggatggcgtgcatctcggtgtcgttgttgcccgccatgcccagccgctcgatcagctcgcccacggggctcttgctcccctcggcccagtcggctatgcgcacgacgaccttttcgccgtccttcacgtcggggtacagccgtttggagaggtagatgtccatcggcatacggcgcgaatccgcccgtacgaatatctggtgcgcccctacttcggcgatgccgacatagggtttgcggctgcgttcaacgatgcgtgtgatctcgccctccatcttcccgtcgcggccgcggtgcatgacgaccacctccacgcggtcgccgttcagggcgttggccgtgttgcgctggttgacgaagatatctttctcctcaccctcgacgcgcacgtagatcgaccccgtggccgtcatgtccgccacgccttcgaagtggggcaggtgcttgtgcgtgaggcggtatttctcgcgtgcgcactcctcgacgatgccttcgtcgtgcagccgtcccaggatctcgaatgtttcgcggcgcccctctttcgtggcgcctcccgaggccgaagccaggtgcttgagtgagaatttattgttggggaactcccggaaaaggctcaggatgattgccgccctgtcggtgttcttcgcacccttttccgggcgctttttttgtgtttgctttttcatttcttcagaatttgcagggcaaggcgcttcatgaagccgatgcccacgttgatagccccttcatcggggttgaatgtcgccgtgtgaggacgtcctgccgcggcgcctacgcccagccggtagaacagcgacggatatttggtgcagtaaaagccgaaatcctcggccgtggtgcgcagcggcagcatttcgacctgcagtttctcctcgcgggccagtgccgcggcctgtttcacgaggtgttcgtcgttgaccacgcaggggtagccgtggctgatgtcgacgacgatccgcacccccaggcgcttgtcgatctcggcggcgatgttgcggatgcgctggtggatgatttcgcgctcacgctcgtcgaacgtgcgcagcgtcccctccaggtagacctcgtcggggacgatgttcgtggcgcctccggcctctacgcggccgatcgagagcacgcactcctcgtggttgagcgcgatgagccgcgtcacgaactccgcggcggccgccacgggatctttcagctgcgggcgcatggcgccgtgcccgcccgtgccgtgtaccgagaagcgcagttcgtcgctggaggccatgtatttcccggcgcggaatcccagcgtcccgacctccagctgcggctcgacgtgttcgcccaccacggcacgtacctcgtacccttcgaacgggttttcggccagtaccagcgacgccccgcccgggttgcactcttcgcccggctggaacagtccgaagagcgtgccgcggaagtcgggttcggcgccgagctgctgcaataccccgaagagtacagccgcgtgcatgtcatggccgcaggcgtgcatgacgccggggttgcacgaccgccagccgatgtcgttctgttcggtgatcggcagggcgtcgatgtcggcgcgcagcactatggcgcggcgtttgggatcggctttcccgtgcccttcgattctggccagtacgcccgtccgggcgatgggacggtgttcgatgcccagctccgtgagccgatcggcgatgaaggctgccgtggcgtgttccttgaacgacagttcggggtgtgcatgcaggtggcggcggaattctgtgggattcatttgtgtcgtttaaaatatcgcttttgcaatctttatgatgttgtcggccttgcccatcgggtagtagtgcaggacggggacgcccgcctcgaccagctcccggctctgggcgacggcccactcggtgccgacttcgcggacggctttcgggtcgtccttgtggcgcagcacctcgcgctcgagttcctcggggatatggcagccgaaggtccggggcagcagcgtcaggtggcgcaccgtcgataacggcttgatgcccgggatgatcgggacggtgatgccggcctcgcggcaccggcgtacgtaatcgaagaaccgcgcgttgtcgtagaagagctgcgtgacgacgtattccgccccggcatcgaccttcgccttgaggcaggcgatgtcggcctcgggcgaggcggcttcctcgtgcatctccgggtaacccgccacgccgatcgagaatttcgagtggtggcactcctcgacctcgccgtcgacgaactggccgcggttcatggccgcgatctgccgcacgaggtcaacggcatgcgtatgtccctgcgggtggggcatgaagaacttttcgttctgcgacttgtcgccgcgcagcgccagtacgttgtgcaggccgaggaaatcgaggtcgatcagcgcatcctcgatgtcgtatttcgactgcccgccgcagatcaggtgcggtacgacttcgacgccgtatttcttctggatggcggccgagatgcccaccgtgccggggcggcggcgtacgacgtgccattcgacgctgccatcgggacgcaccgcctgcttgatgccttcgcggtggaacgtcacgttgatgtaggccgggtcgaatccgatcagccggtcgatgctctcgaagacgccgcccatgccgtcgcccttgagcggcggcagcagttcgaaggcaaagcgcgtgcggcgttgctcgacggccttattgatgatgtctacgacattcatggggttcagatattatgcggtatgagtttttttaccagttcgacatccagcccgcggcgccgggcgtagtcgagcagttgtttggtgtcgaccgtgccgaccgagaagtagtccgcgtcggccagcagcagtccgcagagtgcctccccgggatcgaccatgtaattttccgtgagtttcatgcccgtggtcagttcggccgccagcaggtcgaaaacctcgcgcttgagcgaatggtcgggcgatgcggggtaaccgaacgccatcctgcgtccgcggtattcgccgcggatgacctgccggggtgtgggcgcttcgccggtttcgtagccccacatctgccgccgcacgaacgagtgcacggcttcggcgaacgcctcggtcagtcggtcggccagcagcttggccatgatggcgttgtagtcgtcgcccccggcgcggaatttttcgcacagctccttcagcccgatgcccgccgtcacggcgaagcagccgatccaatcgccttccggggcgatgaaatccgccagcgagaggttgtcctgcccgcgggtctggttgcggagcatcgccaggcggtgttcgcggcccttggggtctgtgatccagatgtcgtcgccctcggaacgcgccgggaagatgcctacggcggcttgcagcgtgagtaaccgctcgtcgcggatgcgtgccagcagcgcttgcgcgtcggcgaataccttgcgggcctcctcccccttttcggggtggtcgaggatctcggggtaacgccccttcaacccccatgccgggaaaaagaagttccagtcgatgtagggctcggcatcggccacgtcgaaatcggggaagaccatccgtcctgggtgtgccggtacgacgggacggtgcggtgtggcgcccttgagggctttgcgcacctcgacgatcgggatcaggttgcgtgtgcgctcggcgctctcgtattcgctccgcatggcctgctgtccggcgcggactttgtcggcgtaaagtgccccgtcggggccgagcaattgtgccagtatctggctgttgcggctggcgttgggcgaatggacaaccacgcccgcgtagaccggggcgatcttcaccgccgtgtgcaggtcggaggtcgtcgccccgccgataatgaccgggatgcgcagggcgcggcgttccagctcctcgcagacatgcgccatctcgtcgagcgacggggtgatcagcccgctcaggcagatgcagtcggcgccccacgccaccgcctcgtcgactattcgctgcgactcgaccatcacgcccagatcctttatttcgtatccgttgcaggccatcacgaccgccacgatattctttccgatgtcgtgcacgtcgcctttcacggtggcgatcagcaccttgcccgctcggttcggcaccccggccgccccctgctcgatgtagggcgtaagcgccgccacggcgcgcttcatcacgcgggcggttttcactacctgcggcaggaacatcttgccttcgccgaagagtgtgccgacatgttccatggcgggcatcagcagcgtgtcgatcacggccatcgggctgcccagggcttcgtaaccctccagcgcatcctgctcgatgaaatccgccacgcctttgagcattgcgtggccgatgcgctcgctgagcgtccccgcgcgccatgcgtcgggagcctggggctgcgtctgggcgaccgtgcgcacctgctgggcatattcggtgagccgctctgcggcgtccgggcggcggcagaggatcacgtcctcgacccgttcgagcagttcgggctctatttcgctgtaaacccgcaccatctgcgggttgacgatgcccatgtccatcccggcgcggatggcgtggtagaggaacgccgagtgcatcgcctcgcgcacggcgttgttgccgcggaaggcgaacgagaggttcgacacgccgcccgagaccttggcatggggcaggttccgcttgatccagcgcgtggcgtcgataaaggctttggcatagctgtcgtgctcggggattcccgtcgccacggccagcacgttggggtcgaagatgatgtcctcggcagggaatcccgcatcggtgagcagcttgtaggcgcgtccggccacctcggtcttacgttcgtaggtgtcggcttgtccccgctcgtcgaaaagcatcaccacggcggccgcaccgtagcggtgtatctcctgcgcgcggcgcaggaattcggcttcgccctccttgagcgatatggagttcacgacggccttgccctgcgtgacctgcaacccggccacgagcacctcccatttcgacgagtcgatcatcgtcggtacgcgggctatctcgggttccgacgccatcaggttgaggaacgtgcgcatggcctccgcaccgtcgatcagcccgtcgtccatgcagacgtcgacgatctgtgccccggcgtcgacctgggcgcgggcgacggagagcgcctcttcgtagttgccctcgcggatcagccgcgcgaacttggccgagcctgcgacgttggtgcgttcgccgacgttcacgaaattggcttcggggacgatgcgcagcggttcgaggccgctcagcgtcgtgacatgtttgggtgccggcacggggcgcggggcgtagttccctgcgatcttcgccagctcgaagatatgtgccggcgtggtgccgcagcatccgccgacgatgtttaccagcccgcggcgcatgtattcgccgacgtcgcgggcgaacatctcgggtgtttcgtcgtagccgcccatgacattgggaagcccggcgttggggtgtgccgagatgcggaattcggccactgcggtcagccgttcgaggtagggcatcagttgccgggcgccgtaggcgcagttgaagccgacggagaggagccgcgcatgcgataccgaggcgtagaaagcctcgacggtctgtcccgagagggtgcggccgctggcgtcggccagcgtgcccgagatcatgacggggattgcgcgtccgagctgggcggccagtgtgtcgatggcgtagagggcggccttggcgttgagcgtgtcgaaaacggtttcgaccagcaggacatccgcgccgccgtccacgaggccgcgcgcctggtcggtgtaggcttcggccagctgcgtgaaggtcacctcgcgggctgcggggttcccgacgtcggccgacatcgaggccgtgcggttggtcgggcctatcgatcccgccacgaagcggggcttctgcgggttgcgggccgtgaattcgtcggctgcgctgcgtgccaccccggccgccgcacgcgaaatctcataggcgtatgcctccagcccgtagtcggccagcgacacggcgttggcgttgaaagagtcggtctcgatgatgtcggcgcccgcctgcaggtattttacgtgtatttcgcgcaccgccccggggcgtgtcaccgccagcaggtcgttgcatcctttgagcagtacgttccagtcgcggaaccgttcgccgcggtaatccttctccgtgaatccgtactgctgcaccatggtgccgaagccgccgtcgagcagcaggatgcgggattcgagcgcctcgtataacttgtttgccatttactttccgatgatttctatttcgaagagtttgctccagttcttgcccgtcacgaagatgcgcttcccggcggcatcgtatgcgatgccgttcagtacgtcggtcgtgggcgtaacctcctcgtcgggcaacagtcccgtgaggtctacgaccccttcgaccacgcccgtcgccgggtcgataatgacgatctggtcggtcgtgtagacgttggcccacaacttgccgtcgatccactccagttcgttgaggaaattgatcgccatgcctttgagcgtcaccgtcgtgcgtttctcgcgtttgaacgtcgcagggtcgagcgtgtagatattggccgtgccgtccgacatgtagagcttctgcccgtcggtggtcagtccccagccttcgccgggatagcggaactccttgattttcttgcctgttttcaggtcgtagacataggctttgttcgattgccacgtgagctggtacaacttgccgtcgagcagcgtgatcccttcgccgaaatcctcctgcggcagccgtgcgaacacctccgtgcgcccggtttcgaggtcgagggtctgcacgaccgattcgccgtgctctccggtgccttcccacagcaggccgtcggcgaattgcagcccctgcgtgtaactggtcgtcgggtgggggtgtacactccgtacggcatatgtgtattctttcggcgtgacaggagcctcggggcgtttggcacgggcctggttcccgccgcatgctaccagcagcaggccggataacagaacgcttgcgaacttttccattttctcgttttacttggaggcaaagatacgaaaaacccggcatatgacgaattttttatcgttcattgcacaatcggtgcggcggcggacgtccgggacagctccgcagcgcctgtccgtccggcaggcagtattccggccgggtctgccgcctgcctgtccgtccatccgccgcttggccctttgtcggcttgtcgcctgccaaccttccgcctgcccgctgttccccgccgaacgggctggtatacatataatttggaaaaattgttgctttctcggtgaaaatcgctatctttgcaacccgatttcggaacggaaaataggataacaacaatatagcaaccattcattatgaagatcgtaagagaacaacgcgaagaaaacaactcgctgctccgggtgacggtgggcgaggaggattacggccaggccgtcgagaaggagctgcgcgagtacaagcgcaaggccaacatccccggcttccgtcccggcatggtgcccatgggccttgtcaagaagatgtacggcaaaggcgtgctggccgagcagtcgtaccgtacggcgtcgaacgccgtgttcgaatatctccagaaggagaagatcgactatctgggcgacgtgatcccttcggaggagcagggcgatttcgatttcgaaaacggcaaggagttcgatttcgtgttcgagatcggcgaagctcccgagatcaaactcgatctttcggacaaggataaggtgacctaccacaagatcaaggtcgacaagaagatgcacgacgactaccgtgccaactacctgcgccgtttcggccgcctggtcgacgccgacgaggtgacctcggacgaggcgctgtccgtaacgctcgacaacggcgagatgaacgttgccgacgcttatgtcgggttgatctcgatgtcggaggaggagcgcaagccgttcatcggcaagaaggtgggcttcaagaccacggtcaacgtcaacgaactttacaagaatccgtcgcagcgtgctgccgtgctgcaggtcaaggaggacgagctggagggcatcaaccccgaattttcgctggagatcaccaagatccgcaagttcgccgaaccggagctgaacgaggagttcttcaagatggcattccccgcaggcgaggttaccgaccaggccgggctggataagttcatcgacgcgcagatcgggcaggagctccgccgcgaaagcgattacctcttcacgctccagctgcgtgactacctcgtgaagaaggccgcgctgaagatgcccgagaaattcctcaagcgctggctctttaccatcaacgaaggcaagttctcgatggaggatatcgacaaggatttcgaccagttcctcaagatgttcacgtggaactacctccagaagcatttcatcaagcaggacaacctctccgtaacaaaggaggaggcgctcgccgaggccaagtcgctggccgccgcgcagttcgctcagtacgggatgccgtcggcgcccgaggatatgctcgccggctatgccgagaagatcctcgccgacaaggatcagggccagaagatttacgagaagctctacgaagcgaaggtcgtcgaagatgtgaaatcgaagatcaaggtgacggaaaaagccgtatctgcggaggatttcgctaaattggcccaggcactttagtatttgcggaaaaaatcttatctttggactttgcaggcgtgatgtttgcaaagtccttttgtttgtttcagcgccttttccggtggcggccgaaagaaccggatatatggaaattctccctgtgcaaagggaggttcagcgggattttaattatggaatgcggtgcacggaggcgccgtaatatgagtccgacgagttccatgagcgaaaatcccgacatgctttgtaaaacctgaattcgccgggctcgcttttgatatgtcagaatttgaaaaatacgcacggaaccattgcggcatcagttcgctgaaactgcatgacttccagtcggtaagcgcatcgtatgtgtcgccgacgatcatcgaggagcgccagttgaacatcgctacgatggacgtcttctcgcgcctgatgatggatcgcatcatcttcctcggcgcgccgatctacgacgacgcggccaatatcatccaggcacagctgctcttcctcgaatctgtcgatcccgaaaaggacatacagatatatattaattcgcccggcgggtcggtttcggccggattgggtatttacgacaccatgcagctcgtcaattccgacgtggcgaccatctgcaccgggctggcggcctcgatgggcgccgtgctcctgaccgccggcgccaagggcaaacgctcggcgctgccccattcgcgggtgatgatccaccagccgctgggcggggcgcagggacaggcgtcggacatcgagatcacggcgcgtgagatcatgaagaccaagcgcgagctgtacgagatactcgcggcgcattcgggcgtttcggtcaggaagatcgagaaggacgccgaccgcgattactggctttcggcccgcgaggcgaaggagtacgggctgatcgacgaggttctttcaaaacgtgggaagtgatggcgcagaataagaacaacaataaccatcggggcggaacgggcggcgacagctgctcgttctgcggtgccaagcgcggggatgtggagatcatgttccagggcatggacggtgccaatatctgcaacaaatgtatcgagaacggctataagatcatcgtcgagaacgacgtggcctcggagcagcggcgtgccgccgcggcgcccctcaagatggaggagctgctcaagccggcgcagatcaaggaattcctcgaccagtatgtcatcggacaggacgacgcaaagcgctatatggcggtggcggtctacaaccactacaaacggctgctttacgcccccaaggacgacgacatcgagctcgacaagtcgaacatcatcctcgtggggcccaccggtacaggcaagacgctcatggcacgcacgatcgccaggttgctcaaggtgcccttcacgatcgtcgatgccaccgtgctgaccgaggcgggctatgtgggcgaggatgtcgagagcatcctttcgcggctgctgcaggtcgccgactacaacgtggcgcaggccgagcggggcatcgttttcatcgacgagatcgacaagatcgcgcgcaagggcgacaacccctcgattacgcgcgacgtctcgggcgaaggcgtgcagcaggcgctgctgaagatactcgaagggacggttgtgaacgtaccgccccagggcgggcgcaaacaccccgagcagaagttcatccaggtcgacacgcgcaatatcctcttcatctgcgggggtgcgttcgacggcgtggagaagaagattgcccagcgtctgaacacccgcgccatgggatacgggcgcctgaatgccgaccggatcgaccgcggcaacctgatgcagtacatcacgccgcaggatctcaagtccttcgggctgattcccgaactggtgggccgtctcccggtgctgacctacatgcagccgctttcgcgcgaggcgctgcgctcgatcctcaccgagccgaagaatgccatcgtcaaacagtacaagcgcctgttcgagctggacggcgtgaagctctcgttcgacgaggcggtgctggactacatcgtcgacaaggccgtcgaattcaagctcggagcccgcggcctgcgctcgatctgcgaggcgatcatgatggatacgatgttcgacattccctcgacggatgcgcggaaatttaccgttactttgccttatgcaaagaaaaagatagaaaaggcaaatattttggagctaaaacaggttggataatatcttttttattacttttgcagcgagaaccctaagacaaaaccataaaaccacagactgatatgtcatctaccaattccaaactgacccgtgtggccgacaatatccgtatcctttcggccgccatggtcgagaaagccaaatcggggcatcccggtggcgccatgggcggtgccgacttcgtgacggtgctctatactgagttcctgcgttacgaccccgacaacatggcttacccctaccgtgaccgtttcttcctcgatccggggcatatgtcgccgatgctctactcggtgctgtcgctggcgggatactatacgaccgaagacctgcaatcgctgcgccagtggggcagcgtgacgcccggccaccccgaggtggacgtgatgcgcggggtggagaatacctcgggcccgctcgggcagggacatgccatggcgctgggcgccgccatcgcggagcggttcatggcggcccgcttcggcgagtggatggcgcacaagacctatgcctacatctccgacggcgccgtcgaagaggagatctcgcagggcgtgggacgcatcgcagggcatctggggttgagcaacttcatcatgtactacgattcgaacaacatccagctctcgaccaaggtcgatgaggtggacaccgagaacgtggccatgaaatacgaagcctggggctggaacgtactgtcggtcgatgggcacaatatcaatgaaatccgcgaggcgctcgtggcggccaattccgaaacggaacgcccgacgctcatcatcggccatacgatcatgggcaagggtgcccgcactaccgacggcgggagtttcgaggacaaggtatcgacccacgggcagccgcttacggcggcaggcgccgatttcgccgccacggtgaaaaacctcgggggcgatcctgaaaacccgttcgccgtgttcgaagagagccgcgaggcctttgcagagcgccgcgaagcgctccgtgcatgggctgcccgccaggccggggtcgagaagacgtggcgcggcgagcacggcgagctggcccgcaagctcgacatgttcctctcggggcacctgcccgagatcgactacaagtccatcgaggtaaaggcaggcgttgcgacgcgtgcggcgtcggccacggtgttgggcgtctttgccgagaagatcgaaaatatgatcgtggcttcggccgacctctccaattcggacaagaccgacggtttcctcaagaagaccaaggctttcacgaagggcgatttcagcggcaagttcttccaggcgggcgtctcggagctgacgatggcctgcgtggcgaacggcatggcgctgcacgggggcgtgatcccggcctgcggcaccttctttgttttttcggactacatgaaacccgccgtgcgcctttccgcgctgatgcgcctgcacgtgatctatgtctggacacacgactcgttccgcgtgggcgaggatggcccgacgcaccagcccgtcgaacatgaagcccagatacgcctgatggagcacctgaagaaccatcacgacgagcgttcgatgcttgtgctgcgtccagccgacggcgacgagacggtcatggcctggaagctggccgtcgaggagcatcgccccgtggcgctcgtgctctcgcgccagaacatcaagacgctgccggcattgggtacgagccgccgcgaagaggccgcgcaggtttcgaagggcggttacgtggtgatggattcggctaaacccgaggtcgtcatggtggctaccggctcggaggtcgctacgcttgtcgaaggggccgaattgcttgctgccgaaggtatttcggtgcgcgtggtgaatgtcccgagcgagggcctgttccgtgaccagcccaaatcctatcaggagggcatcctgcctgccggcgtcgtccgctacggcctgacatcgggacttccggtgaacctgatgggtcttgtgggcgagaagggcatgatccacggcctcgaccacttcggctggtcggctccctacacggtgctcgacgagaagttcggctataacggtgccacggtggcggccgaggtcaagaaattgctcggcagataatcgtccgggttccctgcgccgtagaatgcggggagccggataaatacgtaatgaacaaggccccgaaatcatattcggggccttgtttgcaaggccttgccatgtccggataccgtgggccggaacctcccgcagcaggaattgcacctgccgttccgtaaaaacgctccccggattcagcaaggatccggggagcattatatatataattaggtgccgctgtattactgcatgtagagcgtgatccggtcgtagtattgcccgtcgatgaaaagttcgcctgtcagcctgccccggcggatgtatacgttgcgcagttcgcgcgggtaatcggcccgcccgtagctgatgtagattttgtcgtcgtaggcgtcccactggatgttgagcgtgtcgaggtaacgccccgtgtcggcgtagcggagctcgtcggtaccgaagccgtccgccccgaaatagacatagctgtccagagggatgcgtccgtcctggtagaatcccaggtcgcccgcccagactctccccgagagcgtgtcgtacaggtcgtcgtcatcgttgtcgcagcccgtgaaggccacggcggcgaacaggagcagtgcggcgaggaaaaatcttttcatatacggtgtgttaagaattgtcggatgcaaaggtatgttttttttgcatattgtgaaaatcctgcgtatctttgcagtcccgcctgtcaagcggggagatgtggaaagatttgactgattgcaaccacaataaaaaatcgctaaaacagcttattttttattccaacagccaatttttcccattttatacgtttttatttatttaccgggtaattgcatgcccacgtcagccgtttgtcggtaccggttattttgtgtggtatcgccaagtcccctccggggaggggattcagggagcgtagccttttcagcacggctgtaagccgtgggtgcggccgctccgggctatcggccgggggaagtatgcgataccataaaacaatgtatacaatgggctttttgtttacatcggaatcggtgtccgaggggcaccccgataaagtttcagaccagatttccgacgccatcctcgacgaattcctgcgccgcgatgccaattcgaaggtcgcctgcgaaacgctgtgcaccaccgggctggtggtcgtggcgggtgaagtgcgttcggatgcctatgtcgacgtgcagggcgtggcgcgccgcgtcatcaaccgcatcggatatacgaagagcgagtaccagttcgactgcaattcgtgcggtatcctgtcggccatccacgagcagtcgtccgacatcaaccagggcgtcgtgcgtgccgccgaggaagaccagggcgccggcgaccagggcatcatgttcggctatgcctgcaacgaaacccgcgagatgatgcctgcgacgctgatcctctcgcacgtcatcctcaaggagctggccgtcatccgccgtgaaggcgaggcgatgacctacctgcgtcccgattccaagtcgcaggtgacgatcgagtatgacgaacagacgaacaaaccgctgcgtgtgcataccatcgtggtgtcgacgcagcacgacgagttcatcctgcccggcaacggcctcacggagaaagaggccgaggagcggatgcaggagcgcatccgcgaggatgtgcgcacgatcctcatcccgcgcgtcaaggcgcgcctggagcgtgccggcgacaagctggccggtctgatcggcgacgactacatcctgcacgtcaaccccacgggcaagttcgtgatcggcggcccccacggcgacaccggcctcacggggcgcaagatcatcgtcgatacctacggtggccgcggcgcacacggcggcggggcattttcgggcaaggactcgtcgaaggtagaccgctcggcggcctatgccgcccggcacatcgccaagaacctggtggcggcaggcgtcgccgacgaagtgctcgtcgagttatcctatgccatcggcatcgcccagccgctgtcgatctacgtagacacctatcgttcgccccgccccgcggcgctggaggggatgaccgacggcgaaatcgcccgccgcatcggcaggcttttcgacctgcgccccgccgcgatcgtgaaacgcttcgggctgaagaacccgatcttcgaggctacggcttcctacgggcatttcggcaaccgtccttatacgcaggtcgagaaggtctgggagaacggccgcgaagtggaacgcgagatcgagtatttcggatgggagaagctcgacgcggtggattgcatccgtaaagagttcgggctgtaacgctccgggacacggcagatcgggacattcggcgcggatgtcccgatttttgtgtatttccgcatactaaccggacgttttcgttcgtttgtcctacgaaataaaaaattttaataagcctatggcggaagttgcctctgattaatttattgaaccaattagtgattatgaaaaaggcatttttaattttaggagtagttgccgtgtcggccgcagcaggcggatttacggcttggaaagttaccgcgccccgcgagggttcggtgcaatacatcgagcgtgaggtggaacgtacgcccgcgctgggaacacattttacgtcgtaccaggccgagcagtaccccgacctgacgtacgccgccgagaacgcggtgaaagccgtcgtcaacatcgaggccgtgcagcaggtggagatgccccggcgccggggttacgacccgttcctggagttcttcggtatcccgcagggttatgacgaagggccgcagttccgcgagcagcgtgccggcggttcgggtgtcatcatctccgaggacggctatgtcgtcaccaacaaccacgtcgtggacggggcctcgaagctcaaggtgaagctcaacgacggccgcacgttcgaggccaagctcatcggtaaggactcggcgaccgaccttgcgctgctgaaaatcgaggccgccgacctgccgaccgtgccgttcggttcgtcggacgcactgcgcctgggcgagtgggtgctggcgatcggttcgcctttcgacctgcaatcgaccatcacggccggcatcgtgagcgccaaggcgcgtaacctgggcgtgattcccaacgatttcagcatcgaggctttcatccagaccgatgccgcggtgaacccgggcaattcgggcggtgcgctggtcaatacgcacggcgaactggtgggtatcaacacgctgatcaaatcgcagacgggcagctacgtgggttattcgttcgccattcccgagtcgatcgtccgcaaggtggtcgtcgacctgaaggagtacggcatcgtgcagcgtgcgctgctgggaatccgctatggcatcgtcgaccaggacttcatcgacaacatgggtgaggagaccggcatcaaggaactgggcggcgcctatgtcagcagcgtcgtcgaaggcggttcggcttcggaggccggtatccgcaagggcgacgtcatcctggacatcgacggcgtgaagatcaacgacaatgcgacgctctccgagcagatcggtcgccgccgacccaacgataaggtcaaattatcggtaaaaagagacggcaaggtgaaacaaattgacgttactttgcgtaataaagcaggtaaaacggaattaattaccaaagaagacgtcgatatggtcgaggttctcggaggtaagttcgccgatgcgggcgccaaactctgccgtgagctcgatatcaagggtggcgtgcaggtagtcggcatcaaggccgacggaattctggcccgtgcccgtgttaagcagggatttgtgattacccacatcaacgaccgtccggtctactcgctctccgacatggagcgcttgaccgacaaggtacgttcgatcgacggcatctatcccaacggccgtgctgcaagctacgtgcttgtggaatagcaggacgacccgggtgggttttgcttgagaagataattttttaggaggttaaataagaacatgcgtcaattaaagattaccaagtccatcaccaaccgcgagagcgcttcgctggacaagtacttgcaggagatcggcaaggaggagctcatcacggtcgaagaggaggtggaactcgcccaacggattaagaagggagaccaggaagccctggagaaactgaccaaagccaacctgcgcttcgtggtctccgtagccaaacaataccagaaccagggactgagccttcccgacctgatcaacgagggcaacctggggcttatcaaggctgccgagaaattcgacgaaacccgcggtttcaaattcatctcgtatgccgtatggtggattcgccagtcgatcctccaggctctggccgagcagtcgcgcatcgtgcgcctgccgctcaaccaggtggggtcgctcaacaagatcaacaaggcgttcgcccgcttcgagcaggagcatgagcgcaccccgtcgcccgaggaactggccacggagctggaactccccaaggagaaggtcaccgacacgctgcgtgtcgccggccgccacgtctcggtcgatgctccgttcgccgacggcgaggacaactcgctgctcgacgtgctggtgaaccccgattcgcccaatgccgacagggggctgatcaacgagtcgctttcgaccgaggtcgaccgtgcgctcgagacccttacggaacgtgagcgcgacatcatcaagtatttcttcggtatcgggacgtcggagatgaccctcgaggagatcggcgagaaattcgacctgacgcgcgaacgcgtgcgccagatcaaggagaaggcgatccgccgcctgcgccactcgtcgcggtcgaaactgctgaaatcctatcttgggtaaacggtattgtgatcgtaaaatcccggactaaatcagttagtccgggattttttttgtgcctttcgcttccctttacagcaacaatccgagcgtgagcagcaggccgaacaacaggatattgcgtgacgtggcgcccaggacggcgttcagttcgcggccgcggccgatccgtaccatgcggcgccatgcagcgacatgcggcggcaggtagagcagcggcaggagtgccgcccatgtccgcccgtcgccccaaagcccgaggcagagcgctgcggccgcgaatcccgacagcaggtagagccgttgtcctgcccgttcgcccaggcggacgacgagcgtccgtttgccgctgcgggcatcctgctcgcggtcacggtagttgttgaccatcagcagtgtgtcgatcaccaggccgcaggctgccgcgatgaccgccacctgccatgtccagccgccgcagaggacgtagtacgtgcagccgacggggacgaatccgaagaaaagcaatacgagcatgtcgccccagccgtggtaggccagcgggtaaggcccggccgtgtagaggaatgcgaagaggacgcaggcggcgccgacggcgatgagccaccagcccccgtaggcgatgagcccgcagcccgcggcgcaggcggcgagtgtggttgcggcgatgcccagccgcatggacttcggggcgatccacccctgggcgcaggcgcgttcaggcccgaggcggtcttctccgtcggagcctttcaggtaatcccacaggtcgtttatcaggttggcgtcgatctgcatcagcaaggcgaatgcgaagcagagtaccgcgggcaaaaggacgaacccgccgtccgccgccgcaaggccgcagcccagcatcaccgggacggcggctccggtcagtgtcttgggacgtgccgcaagcagccatgcccgcagggaatcggtgcgtatctcttttgtagccatcgtttcggtttgtgggcgcggggctatcccggatttaccacacgatgggttcctgccccacgctgaggaggtattcgttggcgcgcgagaaatggcggcagccgaagaacccgcggtagaccgacagcggcgagggatgcacagccttgagtatgcagttgcgctgcgggtcggcgatggcgccttttttctgtgcatagctgccccagagcatgtagacgataccctgcttgcgctgggcgatggcgcgtaccacggcgtcggtgaaggtttcccacccatgcccggcgtgcgaggctgcctcgtgggcgcggacggtcagcacggcgttcaggagcagtaccccctgctcggcccagcggtcgaggttgcccgtcggggggatgggtgtcccggtgtcgtcggaaacctccttgaagatgttttgcaacgagggcgggaacggcacgccgtcgcctaccgagaagcagagcccgttggcctgtccggggccgtggtagggatcctggccgatgatgacgactttcagtttgtcgaaggggcatttgtcgaaggcccggaagatattgctgccgcgcgggtagatgcggtgcgtggcatattcctgccgtacgaattgcgtaagggcggcgaaataaggtttctcgaattcgggagagagcagctctttccagtcgggggcgatctttacatccatgttgcaaggtggttaaagtggtgtaaatgtagtaaaaagttggcagattcctgttatctttgcacgaggatatgaagaaagcatttttgtttctggcgttgtgcctgctcggtgcaggccgcgcagcggctgcggaacccgtcgacagtgtccgcaatgtgatttatatgatcggcgacggcatgggcctggcgcatgtttcgatgctcgccgtcgaaggcggctatgccccgacggctttcgaccgggcacagggtattgccctgatctcgacctattcggccaacaaccgggtgacggattccgcggctgcggggacggcgctggcatgcgggagcaagacgaataacggtacgttggggctggatccccggggcgggcgtctgcagtcgctcatcgagtgggcggtggccgaagggatgcctgcggggattgccgtgaaatgccatctccagcatgccacccctgctgcattttacgcgcatgtcccggatcggggcgacgaaaaggccattacgcgcgacctgctggcgagcaatatcgacgtgctcataggtgccggcaggcggctcgaaaaggagtcccccgagggcggttcgtatcgtgatgcgttcggccgccgcggctatgcggtcgccggttcgctcgaagaggcggagcccgttcgtgcgggacgattgctgtgtgccgtgaccgatgaaaatatcccgaagacgatccggcgcgaagattacctgcgctgcgccacgcagaaggcactggaaatactcgcccataatgccgattccgtcggccgcggctttgtgctgatggtcgagggctcgcttatcgacggtgcgtcgcacggtaacgatgcggagaagatactggccgaaatgcgcgatttcgagcgtgccgtggctgcggcgatggactttgccgaccgcacgccggggacgctggtcgtagtgacggccgaccatgaaaccggggggctcgccatcccgagctgcgacggtgattttacccgctccgagagcggtatccgatatgttttcggatccaaaagccacacggcgacctacgtccccgtttacctttatggtacgggtgcggggcatattgctggaataatggacaacacgcaactcgcccggcgggtcatggcgctgctcgggaaggagtagccgtttttgtgcagcgcgcccggtgcggccccaccggaaggcatgccattgtccggtgaacgggggccgggaattacgccctgcctgcacgggtgatgctgtttcggagaattgctgcgccgcccggcggcaaacggctccggttccgccccgtattaaatacaaacggcgtccactgaactcggggtggacaccgtttgctgcttatggttggtgcgatgcttcggaaagcctactttttttgggtgccatagccgactactaaaatctcttccatgtcaccttcccgctgtgcggtgtccttgtcgtggaggatgccttcggatgtctggacagcgaagtctaccggcatgccgaattttacgcgtacggcctctccgcgctgtttgccgggcgtccatttcggggatttgccgatgacgcgcagtacctcgtccgcaagggatttatcgggcgatttgaatatttcggcgttgcccaccgagccgtccttctcgatgacgaacgtgaccaggactttcccgtaaatgtttttgccgagggcttccgccgggtatttcacgttcatttgtacccaccggcgaaactcgccgatgtcgccgccgttgaattgcggcggggtatccaccaccaggaacggctcctccccggaacctttgttttcactggtcttagtgtcctgtgccgtagcagttattctgaaatcaacgggcagcgtatatctcacacgcaccttttcgccgcgctgttcgcccggtttccatttgggcgaagctgcgacgacgcgccgcgtctcttccgagaatgccttgcccggcgtctgaagtatctggatattgcttaccgagccgtccttttcgacgacgaacgacagtacgacacgtccctgctccccgttcctgaatgcctcggccgggtatttcacattcgcctgcacccacgtacggaaggtgttcaggtcgccgtatccggggttgtcgccctcctgcatcgggaacaagggcatggtttctgcgatcaggaacggctggtcgtcctccttctcgccggtttcgcggatgctgccgtcctgcagttcggcctgtgccgtggctcccattctgaaatctacgggcagggtgtatttcacgcgcaccttctgcccccgttgttcgccgggtgtccatttgggcgatgcttcgattacgcgcagcgcctcagccgagagcgatcggtcgggtgtctggagtatctgcatattgcttaccgaaccatccttttcgacgacgaacgacaatatgacgcgcccctggatattgtttttgacggcttcggccggatatttcacattttcctgcacccatgcgcggaaggtgttgaggtcgccgccccggaacgagggcatcgtttctgcgatcaggaagggctgctcgttatcttgcgcaaagctgccggtcatggtcatgcccctctgctccgatgcggccggtgcggggctgtatcctttggtcgttatgattaccacgccgttgcgggctcgttgcccgtaggtcgctacggaggcttggtctttgagaatcgttatgttttctatgcggttcggatcgagcttgtttatgaaatcgggggccacctcgatcccgtcgaccacccagagcgggttgccgatctcggccgaaagcaccggtgtccccggggtttcggattccagcgggatcccggcaaactgacgggctgcctctccgacctccagcaggtagggtttgcaaccgacgtaggtgacggtgagtattgatccctgcggggcggagatttccgcatgtcccgatttatcggtgacaacgcccttttgcgtatcctttatcgttatcactgctccgggcaggggttcgccgtccttaagtaccgttacggcgacctgtttttcggtggttgccgctccttggttcgacgagcttgcggccctgttttcagttcggagcaacacgacgacggtggcctccttttggctatgctgcttcgtatcgaccgtcgccggttcgtagccgggatagcttatcatgagtttgctgccgcccgggacggcgatctcggcatgcccgtccgtatcggtcacggtgccctgcgtcgtgcctatgacctgtacgatggccccggagagcgcccctttgtccttgctccgaacctctatcgacacgctgcgtgtcttgtcctttttttcatctccggcattctgtgtttccagcccgggagcggttcctatacctgtgccggctgtcggggcgacgatcactgcggcgcgcgtagtgaacgaaaatgcgcacaggagccctatcagggcaggcagcgtacctgccagccggagcaggctgtgcctgccttttgtctgcgtagtcatcattttaaagcgttttttagtaagtgagttacgcagcccgttggctatttccggactataaccgaaaagctgcttgaagatcgtttgcatgtattcggccctgtcgtagccgctcgtgagcacgtcgctgtcggcctcgaattcctcggcctcggtcagccgccgtgcagctatccatacgaaggggttccaccacagggcggctttcatggtttccatgacgatccgctcgagggagtggcggtgggctatgtggctcgattcgtgggccaggatcgcccccatttccgcggcgggggttgcggcccatatgtagattgtgcggaagaacgagaacgaagcgatctcctgccgcgtgcgcacgatcctgtatttgcccgtgcgggtgacctccgcgccgcgccgcaggcgccggatacggaatatctgccacaacatgatgccgagaatcagggttgcacctgccaggtaaagccccaggcacagatgcccgggcgtgatggcgtgcgcctcggcgtcgggcagcacttcggccgtccagtcagcgaggtcgggcgcagttacggtcggggtcgccacgatgacctgccccggccatacggggatgcgtagcagggggatcagtgcggctgcggccgtcgaggcaagcaggtacaggcggcaccagcggaatttcaccctgcggtcgagcaggatggtgtaggccgctaacagcacgccgctgcatgcgaggacttcgagggcatatatggccagcgttttcatggtcgtaagggcttggggcggagcgggcgattatttgcgggcgttctgcatgatttggagaatctcctccatctccgtgaccgagatgtcctcatggcgcgagaagaacgaaaccatctgtgccagcgagccgtcgaaataggacgacagtaccgacgacatgaccccgcgtgcgtactcttcgcggcttacggccggatagtagcggtggcttttgccctcgggcgtgtggttgacgaaacctttgttttcgaggattttgaggaaggttgcgaccgtggtgtatttcgggcggggttcttttgtctgggcgatgatttcgttgaccaccgcatcgcccagcctccagagtatctgcatgatctcctcttcgccgcgtgtgagttccgttaatttcttatccatatcaaaaagcgcttttttagttcctgttgcaagtttactactaaatttttagatatgcaaatttttcttctaaaaaattagtagaatgatgcgggaggggatcgtacctatgtttataagataagcatttgattgcggagtatgcagcactgggtcgggacgaggcgtcggaagagccggggcgggcggggactggaacgtggagggcctgatccgggggcgtcgcagggaggaggccgcgaaggtatgggagaaatggaagccggaggcggatgggggcgtgaccgtatgacggcctggagggtgggcggtgccggatccataggcgggggccgtgcggaagtgcggggagggtggacgaagccggggtgggcggaggctgtggtgtggagccaggggtgcggctgggggcagcaggaggacggaggattagcgggttgcggtaaccggggcccggatatggaaatccccgcagagggagtgggtggatcgggcaaatggctctacccgggcaaaactgctgggcgcgtaaccagccccgggcacggggtggatcgggcaaatgaccctacgcggcaaaaaatgcggggtgcgtaaagagccccgggtatggggtgaggtgtcgaaccttacctattccttacgggcgttgcggccggagctatgcttttccggccggcgtactaaccctgccgtgcctcttcgttgtccttctccgccttctcgtcctcttcccagtcgaaccacgggaattcgtggcgcccggcgagcgaaaaacgggtataggtgatcgggagccccatttcgaggaaccgtttttcgtaggcggtcttgaccgacagtacctcgtcggcgtagcccgtgccgtagatgtcggcgttcgagacttcgcacggcaggccgtagcggcgcaccacctcgttcgtatagccgaaaagatgtttcgaatcggtcttgaggttgatccaaccgcccggggacagtatgcgggcgtaatatccgaggaaaagcggcgaggtgaggcgtttcttcgcccggcggctcttgagttgcgggtcggggaaggtgatccatatctcgtcgacctcgccctcggcgaacaggccgttgataaactcgatgcgcgtgcgcaggaaccccacgttgggcatcttgcggtcggtggcggtcttagcgccccgccacatgcgtgcacccttgatgtcgatgccgatgaaattgcgcgacgggtcgcgctcggccagcgctacggtatattcgcccttgccgcagcccaattcgagtacgatcgggttgtcgttatggaaaaagtcgctgcgccaatgccccttgagcgggtggtcgcaacggaatacctcgtcgaattcgggttgtatgaaacagtcgaaagtcaggttctcgcggaacttgcggagcttgtccttgcccattgttgtctcttattcgctttttacgatatttatgccgacggcctcgacgcccttcaccgggcggccgggtgtgacggttatgcagtagtcgcccgtgcgggcgaagcggatgcggcggcgataggggaggtcggcctcgcgcgacagggcggccggagtgtgcgcggccgggagtgtgagccggaaagcctcttcgtgccggagcgaatcgggtgtgacgactgctatgcgtaccgtcagcgtgtcttcgtccatgcggtcgtcgtagcgcaggaacaaatccatgtcacgcagcgtcgtcgtatctgtgttggtgaagacgatggcggcgggggcgtcccagcccgaggcattcacatcggtcaccgcggctccgtggggtgacacgcagcctgcggcaaaggccgcggtggaaaggagtactgcccgacggactttccggaatgcgctgcccgtccgatcccggtatgcggttgtgccggacgctgccctgcccgacctcggcgtatggaaccacgttgtgccgggttgtgttgcgcagggttgtgtcgtacagggctgcattgctccggcctgcgtggctgtgcttcccggaatgccggccgtctgccgaagcgttccggctgctgcgcgacgtgccgctatgtcacgtgcccgtatcaccgtctattcgtttgaacccccgttgcttccgctgccgttgtcgctgcccccttcgcggcgttcgcctcccggacggcggcggttgcggttgtttcgcctgttgccaccttcgcggcgttccccgccatttgtattgccctctgcgccgttgttgcctccgttgttgccgttgccattgttgcggggagctgcctcattgcggttcccgttgcggcggtcaccgccgttgcggccctccccgttgttccggttctcgttgctgcggccttccccgttacggttctccccgttgcgggaacggtcgctgcgccgctggcggcgttcggggcgctcctgctggggctgctgccccggctgagcctggcggcgctcctgtcctgtttcctgggaaggttgtccgttctgcccctcctgcccgttctgtttgccccggttgcggccgcgcttgttgcgccgtttggccgagtcgaaacgggtgatgctgtcctcttcggagcggtaggtcggctcctcggctatcgggcggatgtcgtcggcgtgctgcagctggtcgaccttcttgcccgcacggttcagcgccatgatttcgcgcacgcgcgacacgggcagcgtagtgacattgaccatcgcatccttgcttgacgagaaggtcatcgtgccggcgaggatgtcgcttttgacgaggaaatattcgccgtcgatggcctgcaacggctcacgcaggcgcgggaactccttgcgggcgtcgacataggtgtcgtattcgtacatcatgcagcatttgagcttcgagcactgcccggccagtttctggggattgagcgaaatctcctgtgcacgggcggcacccgtcgtgacgctcgagaagctcgacatccacgatgcgcagcacagctcgcgcccgcaggcacccagcccgccgatgcgcccggcttcctggcgtgcgccgatctgcttcatttcgatgcggatgtggaaccgctcggcgaagaccttgatcagttcgcgaaaatcgacacgctcgtcggcgatatagtagaaaatagccttgatcttgtccccctggtactccacgtcgccgatcttcatgttgagtcccatgtcggcggcaatctggcgcgaagcgatcatcgtctcgtgttcgagggcaatggcctcctgccatttctcgatgtcgtagggtttggccttgcggtaaaccttcttgaactcgccgttgtaggggttgaatcccgtgcggcgcatctggcgtgctaccaggtcgcccgtgagcgaaacgacgccgatgtcgtgtccgggcgatgcctcgaccgccacgatgtcgccccgcttgagctgcaggttgttggcgttctggtagaacgagcggcgcgtgttcttgaaccgcacctccacgatgtcggtcgggatattctcggggtactcctcgagccacgccgtttcgtggagcttgaaacacccgtcgcagagtttcgcctcgcactctgcgccgcaatcgcagaaactgcatccgcggccgacttcgggtttacactttttcgtatattgtttttcggtgtccatttgtgggcataatttgcgtaaagatacgaaattttttttaaccggcggtcactgtgcctaaatcgttgcctcaattgcccaggcggagcttgcggacgctgcgccggatgcggacgatcatcatcacggccgcggccgacaggccgaacgagaagccgaggaaaagccccgtcggccccatgccgagcgtgaagccgaacaggtaacccaccggcaggttcagcagccagtaggatacgaaggcgatcggcatgatgatcttcacgtcctgtatgccgcgcagaatacccaccgaaacattctggatgccgtccgaaagctggtagagcgccgcgaagaccagcagttgcgaagcgatggcgatcacctcggggttggtcgagaagaacgtcgggatgatgttgcgcatggtgatgaagaccagcgctgcaaaagcgttccaggccagtaccaggtggtacgacgccttggccgccagcgacagctccccgatgttgcgggcaccgtagcagtgcgacacgcggatggtggtggccgcaccgatcgacatgacgatcatgaaggcgcagttgccgatcgtgacggcgatctggttggcgctcatggtctccttgccgaaccagcccatcatgatccccgtgccgacgaacgccgaggcttcgaggaacatctgcatcgagatcggaagccccatgtgcagcaggttcttcaccgtggcccacgaatagttgcggggcgagaacccgtcgaggtagccgcggtatttgtggcggttgtagaagtagccgatcatcaggatcggggcgatgatgcgtgagagcagcgtacccagcccggcgccttcggcacccatctcgggaaggccgaagcggccgtagatgaacaccgcgttgaagccgatgttggccaggttggcgatgatcgtcacgaccatctcgaccttggtgttgcccacgccttcgaggaattgcttgaaggcgaagaagagcatgacgaacggcatgctgaataccagcatcttgtagtagggaatggccatgtcgacgacctcgacgggctggccgaggtggtacatgagcgggatgacggcatattgtacggcggccatcgcgaacccgagcagcgtgtagaacaggatgccgttttgcagcagcccggccgacttctcgcggtcgccctgcgcgtagagttcccccacgaggggcgtcatgcccagcgcgatgccgatggcggcgatgaaaaggatgaagaacaccgccccgccgaacgatacggcggccagcggcacggggtcgtcgccgccgtagcggcctaccatcaggttgtcggccacctgcgtgaggatctgtcccaattgcgtcagtacgacgggcagcgccagccgcaggttggacttgtactggtctttgtatttcgagaaactgtacattcggttttccggattagggtgcaaagatagctatttatgtccggattgcaatcctcgggctgtcccgggatgaaaaatccgcccgtttcggggcggattccatgcctgggatcagtatggaagcgtgatttcgatgcagcagcccgcgcggtagtcggggcatacgcggattgcgcccccgagccgtgtgacgatcaggcggcagaggtacaggccgatgcccgacccgggtttgaaagaatctaccttggtgaagcggtcgaacacccattcctgcttgtccggggcgatgcctatgccggtatcggccacgaggatatggaaccgacgttcacggtcgtccttttcgcagcagaccgtgatggaacccgttgcggtgaatttggcggcgttctgcaacaggttgtcgattacgcgcgtcatgtaggtttcattggtcgggatgacgcaggtgccgcgacccccccccttgaggatgtactctaccgacgggttttgggaaagttcacgctggatttgcagccgctcggcacacagcaggccgagatcggtttcggcgagcggcaggggctcttcggagctgacgagccgcgacagttcgagcatgttctccagcagggtggtcagcgcggtcgtgctggcccatatctgttcgcggaattcgcgccgcgtattgtggtcgtggtcgccttcgagcagtagatccgagaacccgttgatggcgttgagcggcgtgcggatttcgtggcacatcgagttgatgaaggctgttttcatcttttcgctctccatggcgcggcggctttggcgggttatctctttgttggcgtcgatcaactgccgcctgatctgcttcagccgttgaaccatggcgtactggtagatactccagccgatgagcagcaacaccaggatgccgccggcaagcagggcgatgaatcgtatgcggccggtcagccgggacttttcgaattccaattggtcgacgtcgaacaaggtctgcatttcggcaaggctgctttgcgcctcttctacccgcttgttgaaacggatgttgttggcttcccgcaccgctccgagggcttttttatattcccccattgcctcgtacaggtaggattgcgtggcatagataggcgcgaaatccgcttttatacctgcgcgtttataggcggttatggtcgagtcgatataagccacggcccgttcattgtcgcccatatactggtaatagcgggcacttgtgctgtatatttcggccgtgtcgcatttggcgcgggccagctccatgcatttttggtaataatcgcttaccttttcttccgggatcaggtcgcgcaggtaaaccattttggcgtaggcgcgcatcatgtagcccgtcgtgtcgcggtgaggccgttcgaaacggtcgtccatcgccagccatttgcgatgcaggtcgatgcattgcccgatctgctcttcggcgcgcttgtctttgcagagcatatagaggtcggagagctcgtcgtggcaaatcttttccaggtggagccgctcttcgagcgggtatttcccgagtttctccagtgcctgctccacataggggatcgccttggggatgttgccgtaggcttcggtcgagatcgacgaaaagtcgatggcgaggcctgtcaggaattcccattcgatgcgctcctcgggtgtgagctgatcgcggtttttgcctttgagttcttccagcgcacgcgttaccgtttcgatcgaattgttgtcgttcatctgtttccagaggtagtacgcgtaaagcgacgaacggaacagggcgtggcgggaacccgggaggatgctgtccgagagggcgatgtatttctcggcccgccgggtgtcgcggtcggcgaatttacgaaccagaaagtccagcgcatctttgcatccgtaggtatccccggccttgtgtgcttcggcgagtgccgcttcccaatagggtgcggccagttcgaggctgtcgccgctcaggtcggccagcagcacgtatatccgttcccgcccggcagcatcgtgtgtttgcggcaggagcgtaagaaggctgtcggcatgcgccgatccggtgcatgccgatattgcggcatacggaaacaggaacatgacgagccctgacgcaagggcctttatggaaagcggacgcatttttttgttgtggaacggtgctgattccgtgcaaaaatagttaaaaaaatggtcggaatgataatcccggcgtaaaaaatcaggcgcgaacataaaaaaagaccggattcatttccggcctttttcaaaagacagattgcgtgtcatgccacgcgcagttttacgccgtgcgatttgtccgattcgacgacgaccgtgtcgccttcgtggagtttgccgtcgatgatcagcgtcgaaagcggttcctcgacattgtccatcagcgtacgcttgagcgagcggactccgtagcgcgattcgtagcccatggccgccaggcggcgtttggcgccgtcggtgatcttcaccttgtagcccaggcggcgcgtgcgttcgaagagcccctgcaactccagctcgatgatacgctccacatcgctcagttccagcgtgcggaacaatacgatgtcgtcgatccggttcaggaactccggggcgaaggtctgctcgagagccttgcggtattcgcactggggcattgcggaggccgtggcgctcttcgacacggtgctgtaacctacctgcaccgatttcttgaccacgttgcgcgacccgacgttcgaggtcatgatgatgatcgtgttgcggaagtccaccttgcggccagaaccgtcggtgagatgcccctcgtcgaagatctgcagcatcgagttgaagacctcggggtgcgctttctcgatctcgtcgaacaggatcacggcatagggctggcggcgtaccgcctcggtgagctgtccgccctcgccgtagccgacataacccgggggcgagccgatcagccgggcgacgttgtgtttctcgctgtattcgctcatgtcgatgcggatcagcccgcgctgttcgtcgaagagccatttcgaaacctccttggcgagcagtgtcttgcccacgcccgtggggccgacgaagaggaataccccgatcgggcggttctcgtccttgagcccggcccgcgagcggcggatcgtgcgcgagatcttttcgacggcctcctgctgccctacgacacgctgcgaaaggtgctggcagagggtttgcaggcgggtcagctctccgcccgagatgcgctcggcggggatgcccgtcatcgaggtgatgacctgctggatatgctcggccgtgatctccacggggttggtttcgagcgaccgctgccattcgttgcggctttcgcccagtttcgaacggagtgcgatttcgcgcaggcgtgccgaggcggccttttcgtagaccagttctttgaccgcctcgcggcgttcgcgccgcacttggtcgagtgcggtctccatctggcgcagttcggccggttcgcgcgccgattgcaggtgtatgcgcgagcccgcctcgtccagcacgtcgatcgccttgtccgggaagaagcggtcggtgatgtagcgcccggtgagttccacgcaggcctgcaacgcctcttccgtatagcgcaccttgtggtgctgctcgtagtggggtgcgatgttgcgcagtatctggagcgtctgctcgggtgtcgtgggctcgacgacgaccttctggaaccggcgctcgagcgccgagtcgctttcgatgttctcgcggtattcgtcgagcgtcgtggcgccgatggtctgcagttcgccccgggcgagtgctggtttgaggatgttggccgtgtcgaggctgccctgcgtagaaccggcacccacgatggtgtgtatctcgtcgatgaatatgatcgtgtccttggccttgcgcagttcgtcgagcaattgctgcatacgctcctcgaattcgccgcggaacttcgtgcccgccacgagcgacgatacgtcgagcgagaagagcgtcttgtcggcgatggtgtagggcacctcgccgcctgcgatgcgcagtgccagcccttcgatgatggcgctcttgcctacgcccgcctcgccgatcaggatcgggttgttcttcttgcggcgcgagagtatctggactacgcgctcgatctcctgctcgcgccccacgacggggtcgatcttgccctcgcgggccatctgcgtgaggtttacgccgaacttgtcgagcacgtgcgatgtgtttttctcttcgggtttgttttcctcgccgaagtcgagcatgtgtacctgtatctccgtgcggaagtcgtcgccggcggcgaatttcttgatgtcttcggatacgacttcgcccgtgatgccgtacatttcgagtacgcgcgatgtcgcggtcgagcggtcgccgacgatggctcgcagcgcgtgggccgtagaaacgctccgcgtggcgcccgatacggcgcacaactcgtcggtaaaggcgcggtaaaactcttcggggcccgttttctcacgcagcctcgaccccaatacctcgcgttcgatacgcaggcgtacctggtagagctcccagtccttcaggcgggaggataaaagctggtaggcgagtgatccctcttcgcggagcatctccagcatgagaaaatccttcaacgagtggtcgattcctgccttggtcgtattaaacgccgcgcgggcgatgatgccctcgagcgtctttgaaatttttacttgcatgttgcgtcgtcatgaaatttaatgttctaacttttgattcttcgcctatctaacggcgtgttattgccaaatattatgttaacttgtttgtcggcatttattgtgttgtccctgagtggattgtgtgggtgaaatttttggcgtgcgatgccggaaacgggtttgggtgtattctgaaagggttttcggcctttttcgcggggaagagacgctccctcggaagggtgtcgcctgtagtatggaaagggtgcgcggaggcaggatcggttccctgcggccggtgtcggaaagagctcttgcggggcggggttcgccggctttggtttccggggctgcctgcggtgccgggcggctctgtaccggacggcttcatgtgcggggttaccggctgcaccgggatttgctgcctgttgccggccgcagcgccgggcgcgtttcctgtggcggaagatgccgtttgcgccggggattgttactgcggatggggggggcttgcgggctgggtattccggtcggtggccgggtcgtgcgggtcggcggtcgccgctgtccgtaccgtgcggtgtcgggagcggtattgacccgctgaaacaggggccggccggtgccgggcgtcagttgccgttatacaattatgattcgggatgttttatttttgatacgatggctgaaagccgtatcaatacccttccgaagccggatgtaatttttttccaagacattatctccttgaaaaacaattgttattgtaattattaaacggggcgtgtgcgtttttattgtgctggccttgtttatttgtatttttaattttgtatttttgtggaaaaggcccgtccggggctgttgacaaccgacttcaacccgaaaagaatatgaaacggatcctgatccctctcctggcgctcgccgccgccatgacctttgcacaaccgccgcgcccgctgccaccgggctatcccgaccgttcggggaatatagacctcgaaagggggtttcgcaccccgccggcaggttacggcgaggtgcccttctattggtggataggcgacacgctgacgcgcgaacatctcgcctggcagctcgacatgctggcccggaaacggatcagcagcctgcagatcaactattgccacaccgatacgggcggcattacctacggcaggacattccgttcgaagcccgacctcttcactccggcgtggtgggagcttttcgggtggttcatgaccgaggccggcaaacgcggtatgaccgtcagcctgagcgactatacgctgggcgtggggcagggctcctatgtggacgagatgctggccgaagacccgacgctcaacggttcggaactgcatttcgacagtctggaactcggccgcggggagcgtttctcgcgggcttatgcgcagcggccgctttcgctgaacgcttacccgctcgatgcccggggccggatcgacggggcgccggtcgacctgttgccggaaacggggcccgacggggtcgagtggcagaacccctggccgcgggccctcgtggccgaagtgaaggtcgagcggcgcctgccttcgctcgatccgatgcaccctcgggcggggcacagttacgtgcggcactttttccaacgttttgccgaccgtttccccggggaatcggaaacggggctcaatttcttcttctccgatgagctgaacttcaacctgcagggcaatatctggaacgatattttccgcgacgagttcatgcgccgcaagggatacgacatcctgccgcagatcgacgcgctgttcgtcgacctgggtgacagttcggtcaaggtacgcatggactataacgacgtgcgcgtggcgctgagcgaggaaaacttcttcatccccgtctatgagtggcaccagcggcgcgggctgcttttcggatgcgaccacggcggccgtggccgcgacgtgggcgagttcggcgactatttccgtacccagcgttggaaccaggctccgggttgtgaccagccgatgttgcagaaggacattattaaaaacaaggtcgcctcgtcgatctcgcacctctacgaacgccagcgcgtctggctcgaaggtttccacagcagcgagtggtcgaccaactcggcgcagctgaccgatgcgatcttcgccaatttcgccatggggcagaacctgctgagcctgcacgggctttactatacgaccatggggggctggtgggagtgggcggcgccctgcaaccatttccatgagccttactgggacgagatggacgggttgctggagtgtaccgaacgcctgagctatatcctgtcgcagggataccacgtcgccgacgtggcgatcctctatcccgtcgagccggtggtggccgggtacggcaacgaggctgtcgaagccgcctttgccgccggggaggcgatctaccgcgacggcatcgacttcgactacatggattacgaatcgctcggccgcgccgaggtgcgcgacggccggttgcatgtggccggtgagtcgttcggcgtggtcgtggttcccgccatgcgggcgatccgccactcgtcgctcgaaaaactgcgcgacttcgtccgcgacggcggcatggtcatcaatatcggcccgctgccggaggcctctgaaaaggaggggcgcggcggccgggcgttgaaggaactggtggcggatctcttcgggggcgggcacgaccgggttttccgtatcggcgacccggcggatgcgatcgcactcatcgaccgcaatacgcagcgtgatttcacgctgctccgtccggcctcggatgtcggggcccgttctgccctgcataagacggaggatccgaccccttacgtcatgcaccgccgcatcggcggccgcgacctctttgcggtctataacgtcgggcggggcgcaacgtgccgtttccgtgcatggggagccgcggagctgtgggatccctggacgggcgggaaacgcccgctgcgggtcgccgccgtcacggatgccggaaccgaggtggtgatgccgctggagcgtacggacatgcagctgatcctcttcgacccttcccgcgatgcggaggtcggggcggaatccgccggcgcggggagcacgcagcggatcgacctcggcggggagtgggatttccggctggaacccttgctggacaaccgtttcggcgattaccagtggccggggacggacgaaaagatcggagcctgtatttatgatgccgaatacgaacggctcggcggcgaggctcggaaaggccgcggacgtttcaccttcggggagcggttcatgctgctgggagcggtacccgcctcggtggatgaacggacggtgctggacaacctgcccggcacagcgtcgggcgtggaggccgctggcgtgcggtacgagtggcggccctatgcgttctcatggcgctggggcgtcgagggcgacttcgggcatcagggctggcacggcctgaaggcggagatgtacgacgatttcatccgcttgggtgcgaccgaacgggctttcaacggcatggttcgcaaggccgaggcatccggaatgaaggattattacctctacacctgcgtggatgccccgcgtgacgggttgtacgacgccgaatggggcgggatccgccccgtggggttctatgtcggcggggaacggcgcgagcctgcggcacaggtcgttctgaagaagggcatcaacgagatcgtgctgcattacgattcgttcggcacggcgcggttcgccctgcgtgacgggaaggcggacatcgcgcccgagacgctggccgaggccccgttgcggatgaagttccgcggcgaccgggcgctgctgccgttcgacagccggaagacggcggacacgcgggcgcggttcaccttcacggcggcgcccgggctggaggcgctggaattcacggcctttggccggaaacccgaagtgcgtgccgatggccggaaatgccgggtcgccgaggtcgcacgccgcagcgacggcgccgtgacctaccgtgccgtgttgccccggcgtgccgggcttccggcggaggtgtcgctgacgcttaccgaagagtgcgggtatgccggcggtgcggcgatagacggccctgtgaagctggtttgcggggcgggacgctatacggtcggcgactggtgccgtaacgatgccttgcgtacttattccggtgcggcgtggtacggccgggactttacgctgacgaagaaacccgcgggtcgtgtgacactcgacctgggcgaggtcgtctcgacggcccgggtgctggtcaacgggcgagaggccggtttgcggctgacgccgccctggcgtttcgatgtgaccggactgttgcaggacggtgccaaccggatcgaaatccgggtttgcaatacgacggccaatctcttcctctcttcgccgacggtctaccgcggcgatacgaaggccggaatactcggcccggtgcggatcgagattgccgaataatccgcagccgggtcgttcccggggtattaaggcaggcgccgcaaaattgcggcgcctgccttatttggatgaagccccggcgtggattttccggcgtggattttccggcgtattttcgggcgggcgtcttcggtacggcttcgtggcggattccctgcggacttattccgccaaacccgtgggtgccattgcgtacagggcgtccgggtgccgggccgccgtcattcgggggtgtgcccgacagcggatcgggattcccttgttcccgggagggcttccggaatgaactcggttgctggtttgtctcccggtgcagattatttccgcggccactccccgacctccatgtcgcgcatgtcggcgccgtcgatcaccagccgcacggcagtgcggactttgtggaaaccgtattcgccggctgcgcccgggttgacatgcagcaggtcgtaaaccgggtcgtagaccaccttgaggatatgcgaatgcccggcgatgaagagtttgggatgcagcgcctgtatctttgccgctgcgcgcgggtcgtaatggcgcgggtagccgccgatatgggtcatcagcacccgcacgccctcgcattcgaatgcgaggaaatcagggtagacgcggcgtgtgagctctccgtcgatgttgcccgagacggcgcgcaggggtttgaacgacgcgatcgtgtcggccagttcgagcgagccgatgtcgcccgcatgccagatttcgtccacgtccttgaggaattcgcgcagcgtgtcgtcgaatgtcccgtgggtgtcggatatgatgccgatgcgtttcattttatggtcgtgatgcgggttgccgtgccgggaatcgtgcgtttgccgtgcgtgccgccggaaatcttcgatgtattatttatacttgtccttccacaactcctgcatgcgctgggcgatcttcgcctcggtggcattcccggtgttgggttcgtagaatttcgtccctgcgaggctttcgggcaggaactcctgctcggcgaaattgcccgcgtagtcgtgtgcatatttataccctttgccgtagcctgccttgtccatcagcttggtcggggcgttgcgcaggtgcagcggcacggggcggttcgtggtgtcgtgctcgaccagcgacatcgccttgttgatggccgtataggccgagttgcttttggggctggtggccaggtagatcgtcgtttcggccagcgtgatccgcgcttcgggcatgccgatcttgtgtaccgtgtcgaaacaggcattggccagcagcagcgcgttggggttcgccagcccgatgtcctccgaggcgaggatcaccagccgccgtgcgaggaagcgcggctcctcgcccccggccagcatacgtgccaggtagtagattgcggcgttggggtcgctgccccgcaccgatttgatgaaggccgagatgacgtcgtagtgctgctcgccgttcttgtcgtagagggcgatgttctgttgcaggcagtcggtgacgtactggtcggtgatcgttagtttgccctccgtcgccccggccagtatgtcgaggatattgagcagcttgcgggcgtcgccgcccgagaatttgaacaatgcccccgtctgcttcacttcgacctggcgtgctttgagttccgtgtcggtcgtcagtgcccggtcgagcagcgtttgcaggtctttgtcctccagcgatttgagaatgtagacctgacagcggctcaggagcggcgagatcacctcgaacgaagggttttcggtcgtggcgcctatgagtgtcacgacgccctgctcgacggctcccagcagcgaatcctgctggcttttgttgaaacggtggatttcgtcgatgaacaggaagggcggcttggcgtcgaaaaagcgctgtttgcgggccgactcgatcacctcgcgcacgtccttgacgcctgacgtgacggccgagagcgtgaagaacggacggtcgagctgcgtggcgacgattttcgccagcgtggttttacccacgcccggcgggccccaaaggatgaacgacggcacgttgcccgtttcgaagaacttgcggaacacgccgttcttacccacgaggtgctcctgcccgatatattcgtctatcgtgcgggggcgcagtcgttcggctaatggagctgacatgatccgtgtcgttttatgatccaaaaataggtatttttcccggaacaggcaaatgcggtgccgtggatgcaggcaaaaaaagtgccgccgtcaggcggcaccctgtatcgcatggaacccggccgggcgttactcttccggctttaccagcgagaggcacagctcgtcgagctgcgcctggtcgatgcagcccggggcgtcgagcatcacatcgcggcccgcattgttcttcgggaaggcgatgtaatcgcggatcgagtccgagccgccgaagagcgagcacaggcggtcgaagccgaacgcaaggcccccgtggggtggtgcgccgtatttgaaggcgtccatcaggaacccgaagcgcagctgggcctgttcggccgtgaagcccagtacctcgaacatcttggcctgcagcttcgagtcgtggatacggatcgaacctccgccgatttcggtgccgttgcacacaaagtcgtaggcgttggcacgtacgcggccggggtcgctgtcgatatactgtacgtcctccggcttgggcgaggtgaacgggtggtgcatggcgtagtagcgctgcgtttcgtcgtcccactcgaagagcgggaagtccacgatccagagcggcgcgaatttcttcgggtcgcgcagtcccaactgctgggccacttccagacgcagggcgcagagctgcgtcagcgttttgaacttcttgccgcagaggatgaagaccatgtccccggccttggcgccgcagcggccggccatctcccggatctcgtcgggcgtgtagaacttgtcgaccgacgattttacgccctcctgttcgacgcggatccagatcagccccttggcgccgatctgctggcgcttgacgaactccgtgagggcgtcgatctgcttgcgcgtgtaggcggcgcagcccgtggcggcgaatcccgtgacgtattctgcgtcgtcgaagacctggaagccgtggcctttcgcaaggtcggtgaggtcggcgaactccatgccgaagcgcaggtcgggtttgtccgaaccgtatttctccatcgcctcgatccacggcatacggcgcagcggctcagccagttcgatgcccattacctccctgaacatgtgcttggcccagcgctcgaaaatctccagcacgtcttcctgctcgacgaacgacatttcgcagtcgatctgtgtgaactcgggctgacggtcggcgcgcaggtcttcgtcgcggaagcagcgcacgatctggaaatacttgtcgtagccggcgaccatcagcagctgtttgagggtctgcggcgactggggcagggcgtagaactggttggggttcatgcggctggggacgacgaagtcgcgggcgccttcgggcgtcgagttgaccagatagggggtttcgatctcgaggaagccttccgcgtcgaggaagcgacggatttcctgcgccatcttgtgccgcaggatcatgttgcgctgcaacggcgggcggcgcaggtcgaggtagcggtatttcatgcgcaggtcgtcgccgccgtccgaaacctcttcgatcgtgaacgggggaacttcggcctcgtggagtatggtcaccttctgggcggcgacctcgatgtcgcccgtcgccatcctgggatttttcgattgccgttcgatgactttaccgaccacctggatgacccattcgcggcccacgcaacatgccgtttggcgggcttcggcgggcgagtgctcctcgatgacgacctgagtgatgccgtagcggtcgcgcaggtcgatgaaggtcatggcgccgaggttcctcactttctgcacccatccggcgagggtgacggtctggtttacgttttcggctctcaggcagccgcacgtatgggttctgtacataggggtttgtattttttgtttgttttgtccttgcaacccgcaaagttaaataaaagaagcgaaatacggaacgcgggccgggatttttatttggcgcggggcgtgccgcggcggctcctgcgcgggataatccgccgcccgacgaggccgtttgtaaaagtttgtctatttttgcggaaaatacccgaaatggaagaacagcggaaaaccgacgaaaaattcatgcgcctcgcactaaacgaggcccgcaaagcgttaaatgaacaagaggtgccgatcggtgcggtagtcgtagccgacggtgcggtggtgggccgtggccacaaccttgtcgaaacgctctccgatcctacggcccatgccgagatgcaggccctcacggccgcggcgtcgaccctcggcggcaaatacctgcaagggtgtacgttatatgtcaccgtcgagccgtgcatcatgtgcgccggagccatcggctgggcacaggtagggcgtgtggtgtggggtgccgacgatcccaagaagggttacagacgttattccgaggcggtcttccatccgaaaacgacggtcgtgcgcggcatcctcggcggggaatgcgaggcattgatgacctcttttttcgccgggttacgcgattaggccgtatttagattttgaaaaaaaagaaaaaaaatatacttttgcatccaacgtacccgcaaaccgggatgtatgaactgaaaaacttaaaaaacgaatagaagaatgaaaaaattattagtatcggtaattgcgctgttcggggccgtatcgctctcggcgcaggatgtcacggcaatttacaatgaggcggcggccgctttcggagcaaagaatttcaccgaagcagctaccaagttcgaacaggtcatcgaccagggcatggacaacgagagtgccgcttcgatggtggctacggcaaaatcgacactgcccaaatgctatttcatgctgggcggcggtgcgttgaagaccaagaattacgacgaggcgctgaagaacttcgagaaatcggccgagctggccgaactttacggcgacatgaaccagatggccaagtcgaacggctgggttgccaagatttaccagatacagggcggcgacgctttcaacaataaggactatgccaccgcgtcggaaatcttcgccaagggctatgccgccgaccccgacaacacgggcatggcgctcaacctggcgatgagctattgcgaaatggccatgagcagcggcgatatgtcgcagtacgaaaagggtatggaaatctacgaggccgttgctgccaagacgcaccctaaatatgccgaagatgctgccaaggccaaggaggatatggcgctctataccaataatatggttgccaagatgcaggctgccaacgatttcgacgggatcatcaagatggccgacgacctgctggccaagaatccccagagcgcactggcgcagaatgtccgtctgcaggcttatgccaacaagaaggactatgccaaggttatcgaactgggacaggctgctgccgatgctcagaccgatccggccgacaagagcctgatgtactacctgctgggcgccgcttacaatgccaaggagatgaagccgcaggcaatcgccgccttcaagcaggtgaccgacggcccggctgccgagaatgccaaggctgccctggccgaactttccaagtaaacggggtaagtgccgatatgaagcgggttcgtgagaacccgctttttttgtgcggaatatgccccccccctcgcggaatcggctttttattgcgggcgggcaggaaaccgcggtgtccggcgtttgttccgggccgggttttgcatttccggccggggcgtgggtttgccctaaggtggatgtggaagtcgtgccgaatgcccgggttgttgtcgcggcggaagcgcggggcgtctgtcctgcgtatgcggggacgggttattcggggccgggggtgccggcgatgttgcttcggatgcgtgccagtccgctgcgggtcagcggtgtcgtgcccatacgggcttcgaattctgcttcgtccatcgccagccacgcctcggcgtccatcgccagcgggtcgaacacggggtcgaaggccgggttggtgtgcatcggggccttctggttgtgggggcaacaactctggcagcggtcgcagccgaagatccagccgtcgaggccgattccttcggtgggctctttctcgatcgtgtggcaggagatacagcgtcccgtgtcgatcaccttcggggcgacgatggcgcccgtcgggcagctttcgatgcaattgtggcagcgtccgcagcgcgacccttcgaacggcgggtcgtagacgtcggcatcgtccgtgagcaacaattcgcccagcaggacataggtgccgaaacggggtgtcaccagcagcgactggcggcctatccagcccagcccggcctcgacggccagctgtttttcgagcagcggcgccgtgtcgacgaacgcccgccccgacagatcggggcgggaggcgcggagtgcatcgagcatccggccgagcattcccttgatcgtcgtgtggtagtcggccgcacaggcataggaagctactttcgtgcggtgtccgggagggtagccctcgcctgcgcggtttttgtaactcacggcgcagaccacggccgtacgtgcgccctctaccagtttgcgcgggtcggcgcgcttctcgacattgcactccatgtaggccagcgacgactggtagcccttgccgagccatgcccgcagcatcgactcgttctcgaccaggtgccggcacggggccaggccgcaaaggtcgaaccccgcatcggcggcaagttttttgatgtactgatggtcgagcattttattattttggttcaaaaatagtgatttttaaccggaaattagtaatttcgccccaaactttcgcgttattgaaacgtagttaaaacgaaacgtattatgaccatcaatacactttacgaactggcccgcaacagcgtggagaagttcgcgtcgaaagtcgcattttcgatgttcgaaggcgacgacgtgacttatgccgaggtgggccggcgtatcgaaaaagtgcaggagatacttacctgtgcggggctccatgccggggacaaggtcgccttgctcagcagcaacatgcccaactggggtgtatgctatttcgccgtcacttcggccggcatggtcgccgtgccgatcctgcccgatttttcgggcgaggagctcgacatgatcatcgcgcattccgaagccaaggccctgctcgtttccgaccggctctttaccaaactctcgaaacagaccatcgaacggctgaacgtcgtggtgcgcaccaagaacctgggcgtcatcgctcagcgtgtcaagggggagggctccatggccataccgaagcccgatgacctggccgtgatcatctatacgtcgggtacgacctcgaaacccaagggggtgatgctgacccacgcggcactctgcgcccaggtcgggatctcgtcgagcatctttcccgtactgcccgacgacgtattcctctcggtgctgccgctttcgcacacctacgaatgttccataggcatgatctatcccttctcgatgggcgccagggtggtttacctcgaccgtccgcccacggcctcggcgctgatgccggcgctgcgtgccgtgcgtccctcggtcatgctgatcgtgccgctcatcatcgagaagatctaccgccaccaggtgctggccaaattcaattccaacggtttctggcgtacgctctataaggtgggattcttgcgccgctacctccaccgcgtcgcgggcaagaaactgctcaagctcttcggcgggcgtctgcggttcctcggcatcgggggcgccaaactcgacggcggtgccgaaaagttcctgctggaggcgaaagtcccttatgccatcggctacgggcttaccgagaccgcgccgctgctggcgggcgccgcaccttcgcaggtgcgcctcggctcgaccgggccccaggccccgggcgtacagttgcgcctggagaatatcaaccccgacacccggcagggcgaggtcgtggcgctgacgcccagcgtcatgctcgggtatttcaagaaccccgaggcgacgaaggaggtctttaccgacgacggctggttccgcacgggcgacctgggcgaattcgacaaggacggctggctttatatcaagggccgcctgaagaacatgatcgtgggccccggcggcgagaacatctatcctgaggatatcgaaaccgtactcaattcgcacgtatatatcgccgattcgatcgtcaccgaacaggaggggcgcctcgtggcactggtgcatttcaaccgcgacgagatcgaggccatggtcgacaactggcgtgaggagtgggaaacccagaaggaggcctgggaggcaaagaccgagcagcttaagaaggagatcatggatttcgtgaacgccaaggtcaaccgcttctcgcggatttcggaggtggtcgaggaaaaggatgattttgcaaagactccgacgcacaagatcaaacgatttctgtataacaggaaaaaggacgacgacaaacagcagcgggaacagcctgacggagaacctgaaaccaaatgacaaagcaacgcccctctccggaggggcgttgctcattcccgctctatcaggtcgaaaaatgcgccgagcgatatgccgtagtagcgacagagccgggcgagggtgcttaccgtgatgttgtatttctcggtctcgatcttgccgatatggatgcccgtgtcctcgtagacggtctcctgggaaacaccctttgccgtacgcagttccctgagccggtctgcgatctccttcagtaatgttatgtcccgccaaggttgtttcatgttaacaaagaaacaaacctccccaatatttggtaatgatttatacatcattgtcgggaaatttgcctatctttgccaccatacaggaaacgggccaaaacggcttggcaactcactgtgcgggatgaggcgtcactgaaaatgtgtacccgttgctgccgataccgttttgaccgcagggaacccaccgaggcgggggttccctgtctttttacggcgggtgcccgggaacggggatgggagcggctgttcccggccggaagtcccgacccgtaatatgtgaaaagcccctccgcaaaggaggggctttcgtctttgatccccggtggggactattgcgctgtgtctttgcgcgggataagggtcgtatcgacctggtggggcttgtcgcccacatccacgaggttctcctcttcgaccccgagcgaacggtaataggcgttgatctcgccgatgacttccttgcgcccggcatatacggcaaggtagtagacgtcgcccagctggtcgagtttctcgtcgatgatcggcgacaccatgtcaccctgcacgccgtcgaaacgcaggtaatattcgatgtactcgatcagcgtcctggcgtattcgcgcagcagggcgtcgcccttgtcggccgcatcctccacgcccatcgccgaagcggcgtagtacgcttcgaggaacggataggtgttggaatccgtgaagcgtatctgcgacgggggcagcttcgcaagccccatgtcgagcagctcgacagcttcctgcgcgcgatcctgccgcagcagctcctttgccacgcgggcaaaggcatcgcgggcgtgcgaggcgctcaggttgtattggatgaaataatcggcatataccctcgggtcggcgagattcccgtagcggaatgtctccctgagcagcggcgccgcataatccgcgtcgatgcgcccgatttcccaggggttttgcacgggagtgaggatcggcacgaaacggtaggcgtagccgtcgaactggaggtaatccatcagtccgaaatcctgcaatatgtagacctgcgtcatgtagagcgggcgcttccagtcgaagttggccagcatgtcgaggatcatgagctgcgtcttgtcgatcgagttcttccgcaggttgatgtagaccgtgtcgaccatctgggcgcggtctttctcggcgacgatgcccgaggcgatggcgttctccttgttcaccggcagtgcgatgcgtttggtcgggatgtagtcggtcatcgtcccgtccgagagcttgatcttgctgcgcgggtcttcgctgcgcacgaattcgatcacgtccttgatgtccactgcgcggtcgaagcggttgtccaccggcacccagtcgttggtgaaggtgtacttgctcttgggcagtgagaaaggtacgcccggggcgtcgttggccttggttttcatctcgtcgatgtaccattcgccgcccaggtaggaggtgttcatgatacgcacgtcggggcgtacgccgtagatctcctggttgttccagagcgggaacgtatcgttgtcgccgtagttgaggatgatcgagttgggcagcgtcgacatcaggtagttccagccgatatcgcgcgccatgtaacggtgcgaacggtcgtggtcgtcccagttctgcgccgcgaggatcgtcggcacgcccatgcagaccaccgtcgccgccacggcggccgtgacgttgttgcgcctggtgagccatgcgaccaggtcgcggatggccagtacgccgaacccgatccatatgcagaatgcgtagaacgaccctgcgtagacgtagtcgcgttcacgcggttcgcccggcgaagtgttgaaatagaaaaccagcgcgatacctgtcatgatgaagagccacatgacgatcgagaaattccgctggtcgcggttgagctggtagatcagtccgatcagccccagcaggaacggcaggaaatagtaggtgttgcggcctttgttgtcggcgatttcgcgcggcaggtcgtcctgcggcccgaggtatttctcgtcgatccacttgatgcccgacagccagttgccgtcggtgatcgtcacgcgggtcggctgtatgtcgctctggcgccctacgaaattccacaggaaatagcgccagtacatgtacgagagctggtagttgaagaaatagttgaggttctcgaggaacgtcggctcgacgatcgtgcgcggttcgtacccgtcgtcgtataccttcttggtgccgaagtcgagcacttcgccctgcatggggcgtccctgcgagtcgcggacgatttcgcccttttcgtcgcgcatgatctcggttttggtgcggtaggcggcccattgcttgtactccttctctcctttgcgcgcatcccacatgcgggggaagaagtggatgaattccggggcgtgggtatatcccgtgatgaccgatgcgggcttgtacttgccgtcctcgtcgaggtagtagaaatgcttttccttgtacccttcgggcggggccgagtagtaagcgccgaacagcagcggccggtcgccgtactggtcgcggttgagcaccgacatcagtgcgtgggggttgttggggttgttgctgttcatcggcgggttggcggcggcacggatcgtcaccgaagcgtaggacgagaacccgatgaggatcatggtcgtcgagagcaggacgatgttccacacgaccttgcctttgcggtgtgtgtaccacgaagcccagcccatgccgccgatcagcgccagtgcgaagagcaccatgcccgagttgacgggcagccccagcgtgttgacgaagaaaaggtcgagcatcgccccgacgtagaccgtgtaggggatgatgatgttgttgacgaagatcaggatggcgcccgcgatcagcgtggcgtagacgatgcccttgaaggtcaccttctccgtcgtgcggaaatagtagatgaacaccagcgccgggatggtcagcaggttgaggatgtgcacgccgatcgacagtcccatcatgtaggcgatcagtacgatccagcgcgacgagtggggctggtcggcctcctcctcccatttgagcatcagccatacgaccagcgccgtgaacatcgacgagagggcgtagacctcaccctcgatggccgagaaccaaaacgtatcggtgaaggtgtaggccagggcacccacgatgcctgcacccaggatggcccacacgttggctcgggtgagctggctgccgtcgcgggtcacgaggcgccgcgccaggtgtgtgatcgtccagaacaggaacaggatgcagaatgcgctggcgatggagttcatgccgttcaccgccatgcccacaaagtccgggttgccggcggcgaagagcgtcgccaggcgcgccagcatcatgaacagcggggctccgggagggtgcccgacttcgagtttataggaggttgcaatgaattccgagcagtcccagaggctcgaaaccggttccatcgtcatcaggtataccagtgcggcgatggcaaagaccgcccagccgacgatgttgttccagcgtttgaaggatgtcatattttttcggtatgtttcgctttatgtcctgcaaaagtaatcatttaacggcgaaatccaatcaatattacctgccgaaggcggaaagttgctatttttacgtcttgaaacagaatgttttcaaactgtttttgtatatttgtttgatgtgtccgtgcgtcggccgttgaaaattgtagaaacccttaaaattccgatagaatgaaacgtttcctgcttctactcgctgcggcgggccttgcatgggcttgtggtaaggacggggctgaaaaccccgctcccaaacccgcggaaaatattgagataccggcttctgtgaccccgcccgttttcgacgagcagggcggcaatatgtcgctgacgtttacggcgcatgaggcgtggcgtgcgagcgtcgatgcgacgcgggcatccaactggtgttccgttgcgcccgagtcgggtgctgccggcgccgttacgctcacggtcacgacgttgcccaatgatacacccgatgaacggaacgcgacgatcttcctcaaagcgggcacgaccacgaagacgctgtccgtaacacagaagcagcaggacgccctgaccgtcacctcatcgaagttcgaggtgggggccggcaccggcgagatcgtggtcgaactgaaggcgaatatcgatttcgactataaaatcggtgaggagtgtgccgaatgggtttcgtatgtcggtacccgcgccctgaaaacctcgcggctcgtattccgcgtcgcagccaatgaggagttgtcggtgcgcgaggggagtatcctcctgcgcagcagcctcggggacgaacaggtgaagatttaccagcagggagccgatcccgcactggtgctgacccaaaagtcgtataccgtgcctgccgccggcgaaacgatcaaagtcgaattgaacagcaatgtcgattatacggtgcagatgcccgaagcggaatggataaccgaaccggccgcacgcgccatgtcgacgcatacgcactatttcgtcgtcgctgccaacgacgagtatgacggccgtacggctgaaatcgtctttaccgacaaggccaataacctctcggaaacggttacggtcacgcaagtgcagaaaaatgccgtcgtgctggcggaatcccgatacgaattcggtacggacggaggcaaactggatttcgatgtcctgaccaatgtcgatttgacggttgcggtatcggacgatgcgaaaagctggataacgcaggtcacgacccgcgggctggagcaaaaaacgctgcatttcgacattgcggcctgttcgcaggaaacggaacgtaccggtacgatccatattagcggcggcggtgtgacacagacggtgacggtcgcgcagggcggcttgaaagaggtgctcgaaaaggaacgcgcggcattggttgcgctgtacaatgccaccggcggcgataactgggcgaataaggccaattggtgctcggacaggccggtaagcgagtggtacggcgtgacagtcgacgaacaggggcgggtagccgggttaaaaatggaggtcaataatttgaccggatgtataccggcggaattttgtgaattatcgaatatacaagaaataaatcttttgggcaaccatttgtcgggtgtgatccccgccgggttcggcaacctgtccaagttaagggtattgtggcttgaagataatattttttcagatatttctgccatattcgaattgcagaatattcagaatttgcatatgtatctgccggaaggaaatatacctgctgaaattggaaatttatccagtttaacagagttgtggttgtatggagaaagtgtgacgggcgcgctcccaagagagatcggaaaccttgtcaacctgaaatatctcggcataacttgttccggattatccggatcgattcccgatgaattgtacaattgtacaaatctggaaacgctaagcataaggtggtgtacaagtttaagcgggacgatctctcccaaattgggacgactcacacaactgaaaggcttagagttgaataataataatttaacaggccctatcccggaggaaatatgcaattgcagccgattggtaaatatattcttacaagaaaacaagttgacgggctctatacccgaaggtttgggcaatctccccgaacttcggcattttattgcattcaataacaatttgagcggaaacattccggcttcgatcctcaaccacagactttgggatgtcgagtgggcgctgattacggagaataacaactttaacatggacggtatcactatcgatgcggtaaacttctcggtaacggatatcgacggcaacacgattgattcgaaagaggaatacgccaaaaataaatatacgatcctgttccagttttcaccctattttggggatttcaccgatatgaaatcctttatcgaggacatatacgacaagtataaagggaaaggcgtcgatgtaataggctattcgagcggacacccgggagcttcggcagaccttgcgtctatgaaaaaatatgtggcggataacaagattccatggcggaatattttatggacggaaacgaactcgatcatcgggcaggaaaatgaacaatatcatcaggatagcggcttcggcccctattatccttaccattcctatccggcatatacggttgtagattcgggcggaaaaatcgttttccatgatttcagcctaagcggcctgaccgggttatccgcattcttagccgatcatacgggcgggtcgggtgtgtacgaatcgtcggattattcgaaagacggcaaagtgacggcgctccagactgcgacccgggggaacggcatcaatatcgtactgttgggcgatgcgttcagcgaccgcctgatcgccgacggcacctacgacgggactatgcgcaaggcgatggaccatttcttctccgaagagccttacaagtcgttccgcgaccttttcaatgtctatgcggtgaatgtcgtttcgaaaaacgaagcatacggttccggtgcgcagactgcgttggacggatttttcggcgacggaacccatgtcggcggcaacgatgacaaatgtaggcaatacgctatgaaagttccgggaataacctatgacaatatcgatgatgcgctgattatcgtgatgatgaaccgcacgtattatgccgggacatgttatatgtattacccctcttcgggcgattacggacaggggttgtccatcgcttattttcccttgggtactgatgacgggatgttcggacagttgctgcaccatgaggcgggaggacacggattcccgaaattggcggatgagtacgcctacgaggaatacgggcagattccctggaacgaggtgcagtctgcaaagcaactggaaccctatggatggtggagaaatatcgacttcacgggggatgtctcgcaagtcaaatggagccggtttatcgccgatccgcgctatgccgccgaggtattgggggcttacgaaggggctgatacctattggagcggggtttggcgtccgacctacaacagcattatgcgctataatacgggagggttcaacgctccgagccgcgaggcgatttattaccggatcaacaagttggcttatggagacgcatgggcctatgattacgaaacgtttgtcgcctgggatgccgtgaaccgtaccgggaatgcgccgatcatgctgcgtacgccgatgcggaagccccggaatttcgttcccttgcatccgcctgtggtcgtaaagcggtcgagatagggagagggcggtgagccgcgcggtgcgaaaatgtgaaaagccggagcattgctccggcttttccatgtggtgtggcatggcgggcacgttgcccggtggttacttgcggcccggcctgaggatgccggacagccagttgcccatgccggactttttcttctccggcgtttgggcttttcggggagcctcggggcttcccgtttcccgtttgtcccgggcgggtttagggcttccgggtttgcgcccatcctgtccccgtcccgtgtttgcggccgctgcgttttgcccatccggcttttgcccgccccggttgcggttgcggttgcggttgcggcggcgtgccgggcgtgccgcggcgtccttgtcctgcggctgttgcccgtccggggtctgcttgccgccggttcgttgcccctgcggtttcgggtcgccgggagcttgtccctgcggtttgcgcctgcccggcctctgtccggcctgactttgtgcgggttgtttttgtgcggctcgcttttcctccgcttgcttctgccctccggtttgtgctatatccggttttttcccggcgggctttttccggctgttttgtgcgggagccagttccccggaatccgggtcgagttccagcccggtcagtttgaggatgtctttcagcagcgggcgttcctcctccgagcagaaggcgatggcctgtccgtcgcgtccggcgcgtcccgtgcggccgatgcggtggacataggtctcgggcacttccggcaggtcgtagttgattaccagcggcagttcgctgatgtcgattccccgcgcggcgatgtcggtggcgatcagcacccggcaggcccccgagcgaaagtcattcatggcccgttcgcgggcgccctgcgacttgtctccgtggatggcgcgtccttcgatgcccgctttggtgaggatacgggcgatgcggtcggcgccgtgcttggtgcgcgaaaataccagcaccgagctctcggggcgttcgcgtagcagggaggccagcagcgtccgtttttcggccttttcggcgaacaggacgctctggcggatggtctcgaccaccgaggccgggggcgttacggtgacgtgcgccgggttgcggagcatcgtattggccagttttacgatgtcgtcgggcatcgtcgccgagaagaagagcgtctgccgcttttcgggcagcagcgggaggattcgccggatgtcgtggatgaaacccatgtcgagcattcggtcggcttcgtcgaggacgaaaaagcggatgtcggacagcgagacgtaaccctggccgatcaggtcgagcaggcgtcccggcgtggctaccagcaggtcgatgccgcgttgcagcgcatcgacctgcggccgctggttgacgccgccgaagatcacgcagtggcggatgtccgtgtagcgggcatagtcgcggcagcattcgtcgatctggatcgccagttcgcgcgtcggcgtgagcaccagtgccttgatcgtgcgccgccctttggtgcgcggctcggccgagagcagctggaggatcggcagcgtgaaggccgccgtcttgcccgtcccggtctgggcgcagcccagcaggtcgcggccttcgagtgcgggcgggatggcctgctgctggatcggagtgggggtcgtgtagcctttttcggccacggcacgcttgagtggttctatcaggttcagttcctggaatgtcattgcatatcggttttgtcccggcgtcgtgcgccggataattcggtgttgataatatacggagggaaaaacgggaagcgtcagaccaacgcgcactattattggcacaaaggtacgattaattccgcgattctggtgcatctcgattaaatttcttatttttgcacaataatttttcgcaatttatggaatcgaaactcgtactttacaatacgctcacccgccgcaaggaggtgttcgaaccgctgactcccggccgcgtgggcatgtatgtctgcggccccacggtctacggcgacccgcacttggggcacgcccggccggcggtgacgttcgacctcatgttccgctacctgaagtcctgcggctacaaggtgcgttacgtgcgcaacataacggatgtggggcacctggagcacgacgccgacgagggggaggacaagatcgccaagaaggcgcgcctcgagcagctggagccgatggaggtggcgcactactatacggagcgttaccaccgtgcgatggatgcgctcaacgtcgagacgccgtcgatcgaaccctatgcctcggggcatatcatcgagcagatcgagttcgtcaagaagatcctcgccgacggcttcgcctacgagtcgaacggctcggtctatttcgatgtggagaaatacaacgccaaatataattacggcaggctttcgggtcgtaacctcgacgacatcatcgccaacacgcgcgagctggacgggcagggcgacaagcgccactcctatgacttcgcgctgtggaagaaggcgtcgcccgagcatatcatgcgctggccttcgccgtggggagaggggttccccggctggcatatggagtgctcggcgatgagtacccgctacctgggcgaacgcttcgacatccacggcggcggcatggatctgatgttcccgcaccacgagtgcgagatcgcgcagtcgaccgccgcgctggggcacgattcggcacgttactgggtgcacaacaacatgatcacgatcaacggccagaagatgggcaagtcgctgggcaacttcatcaccctcgaggagctcttcaccggcagccataaattgctggcgcaggcctattcgccgatgaccatccgcttcttcgtgttgcaggcgcagtaccgctcgacgctcgatttttcgaacgaggccctgcaggctgccgagaaggggctcgaccgcctgatgaagggcgtcgaagcgctcgggaaggtcaagcccgccgaaacgtcgactatcgatccttccgagctggaaaaccgttgccgcgcggcgatggacgatgacctgaactcgccgatggccatttcggcgctgttcgactgggtgcgcatcatcaaccagctggtcgacgggcagcaaagcatcacggccgccgacctcgaagagttgaaagccacggtttaccgttacacgttcgatatcctaggcctgcgcgacgagaaggccgcaggtgcggcttcggggcgcgattatgtgaccccgctggtcgagatgctgctcgacgagcgcctgaaagcccgtgccgcaaaggactgggcggcttccgaccgcatccgcgacgggctggccgcagccggtatccgtgtcaaagaccgcaaggacggcagcgactgggaactggaataagcggaaaaagggaagatccggatcccgggcggaactgtcgccgccgtgcgcggacggtcggggcgggcgcccctgcgggtgtgccgctgtggcgggatggccttgtgcagtatgccgggcgtgtccccgctcccgttccggaggtgcctgcgtgccgtaatcaaggaatagttaggtagttcgtccggctttcgcccggacagagttgataatatatgatatgtctgcaacgataaaaggggcggcgacggagctcgggacggagcgtatccgcaagctgctcatgcaatatgccgtgccggcgatcatcgccatgacggcttcttcgctctacaacatggtcgacagtattttcatcggccacggggtagggccgttggccatttcgggccttgcgctgaccttcccgctgatgaacctcgccgcggctttcggttcgctggtgggtgtgggtgctgcgacgctggtgtccatgcgcctcgggcagcgcgattacgggacggcgcagaacatcctggggaacgtcgtggtgctgaacctcatcatcggcctggcattcggtatcacaacgctgctgctgctcgacccgattctctacttcttcggggcgagcgaagcgacgatcggctatgcccgcgactacatgtcgatcattctcatggggaacgtcatcacgcacatgtatctgggcctgaactccgtgctgcgggcttcggggcatccgcgcaagtcgatgtacgccaccatctatacggtggtcatcaacgcggcgctcgacccgctgttcatctacggcttcgggtggggtatccgcggcgcggccatcgccacggtgctggcgcaggtcatcgcgctcatctggcagttccacatcctttcggacaagagcgaactgctccatttccggcgcggcatctaccgcctgcgccggaagatcgtgcgcgacatcctggccatcggcatgtcgccgttcctgatgaacctggcggcgtgtttcattgtcatcctgataaacaaggggctcaagcaatacggcggcgacctgatgatcggggcctacggcatcgtcaaccgcctggcattcttcttcgtgatgatcgtcatgggcatcaaccaggggatgcagcccattgcgggttataacttcggtgcgcggcagtacgaccgtgtgctgcgcgtgctgcggctgacgatcatcggtgccacgtgcgtcacgggcgccgggttcctgatgggcgagctggcgccccggctggcggtgtcggcctttacgaacgatcccgagctgatccgcctggcggtcgagggaatgcgcattgttttcatctgtttcccgatcatcgggttccagatggtggctaccaacttcttcatgagcatcggcatggccggcaaggcgatcttcctgtcgctttcgcgccagctgctgttcctgatgccgggactgattttcctgccccatattttcgatgtccatacccgctgggacggcagttggggcgtgtggtgcgcgatgccgctgtctgacctgatggcgtcggccgtagccttcttcatgctggtataccagttgcgaaaattccgggcgcagatggatgcggcccgttcaacgaacctccaataatgccgattatggaagataaattcgtcatcaacatcggtcgccagctgggcagcggcggcaaagccgtcggcgaggccgtggcacgcaggctcgggatcggggtctatgacaaacagctcatcaacctggccgccgagcagagcggcctgtgtcccgaagtgttcgaacgggtcgacgaaaaggagtcgcgcaacctcttttcgacgctcgtcgcctacctgcgctcgccgttcgtcgggagcgaatatgccgggagcaacgtgctcagcaacgacgccctgttcaagatccagagcgacgtgatccgcgacatcgccgcgcgcgagtcgtgtgttttcgtcggccgctgtgccgactacatcctgcgcgaccatccgcgggcggtgaatgtctttgtcgcggccgaccgtgccgaccgttgcgagcggctctgccgccagtgcggcattacgcccggggaggccgaggcccggatggatagggaggatgcgcggcgcgcggcgtactacaactattacagcagcggtacgtggggcatggcttcgacctaccacctctgcgtcgattcgtccgtgctggggatcgacggcacggtggatttcgtgctggagttcgtggagcgcaaactgggggtgaaacccggggcgatttaattgtcaataccgtaaatttatgatacttgcagatcagataaaggagttggagcagcgccgcgaggctttggaacgatgtctgggcatcgaccagaaacgcatcgacctgcgcaacgaggaggaaaagacccaggaacccgatttctgggacgcgcccgacaaggcgcgcgagcagttgcgcaaggtcgccgccatcaaggcgtgggtcgacgactacgatgccgtggccaaggatgtcgaagacctggggctgatgcccgatttcgtgaaggaaggggtcatgagcgaggcggagatggacgaccattacgcacagacgctcgagcgtatcgagacgctcgaaatgcgcaacatgctgcgccgcgaagaggacaagctgggggcgatcatggacatcaacgccggagccgggggtaccgaggcgctcgattgggcgtcgatgctcctgcgcatgtatacccgctggggcgaggcgcacggctacaaggtcaaggtgctcgactaccaggccggcgacgaggtgggcgtgaaatcctgtacgctggagttcgagggggagtatgcctacgggtacctcaagagcgaaaacggcgtgcaccgcatggtgcgcctttcgcctttcaatgccaataacaaacgccagacgactttcgcctcggtgttcgtgtcgcctgccgtggacgatacgatcgaggttacggtcaatccgtcggacatcgagtgggacacgttccgttcgagcggcgccggggggcagaatgtcaacaaggtcgagacggccgtgcgcctgcgctaccacggcaaggacgccgatacgggcgagccggtggagttcctgatcgagaatatggaaacccgttcgcagctgatgaaccgcgagaatgccatgcgcatcctccgttcgaagctctaccagcgggaactggataaacgcatggccacgcagcaggcgctcgaggcttcgaagaagaagatcgagtggggatcgcagatccgctcctatgtctttgacgaccggcgtgtgaaagaccatcgcacgggcgtgcagacctcggctgtcgaggcggtgatggacggcgacctggatgccttcatcaaggcctacctgatggaatacggcgccgaggcgtagctcctccgcagccggttccgacaaccggttcgcgtacggccggtattccccgcaggccgatccgcattgtatcgggtgcccggttcttattgcccagcccacttctgccgtgccgccggcctttatggcccgctgcacccgctgccgggcggaggcagggcaggcgccggaggattccctgccggggggcgatatccggcgggcaggaagcccgggcgttataaattgttatctttgccgtatgaagaaatttgtcatctccctgttgtccgttatcttcctttgcgctgcggccacggcgcaggtattggtcggtatgaccgacacgacggcttatttcccgcagctggaagggcggcgcgtggcggtgctggccaaccatacggccgtcgcgcggttcggcgacggcgtgccgggagctgcggcggacactgcggttcggttgccggggacggcgtccgacgggacgatacacctggtcgacctgctgcacggtcggggcttcgacgtgaccggcattttctcccccgagcacgggtttcgcggtacggccgacgcgggcgagcatgtcgcaagttcggtggatgctgcgaccgggatcccgatccgctcgctctacgacgggaatacgaagcgcccttcggacggagccatgcggtcgttcgacgtactggtggtcgacatgcaggacgtgggtctgcggttctatacctactatatcacgatgctccgtatgatggacgcctgtgccgaatccggccgcagcgtcatcgtgctcgaccgtcccaaccccaacgggcaccacgtcgacggccccgtgctggacatgaaatacaaatcgggcgtcggggcgttgccgatccccgtgctgcatggcctgacgatgggcgaaatcgcccggatggccgtcggcgaaggctgggccgcaagctgcgacctgcaagtcgtgcgttgccgcaattatacgcacgacactccgtacgagttgcccgtcgccccgtcgcccaacctgccgacgcaacgggccgtctacctctatccttcggtgtgcctcttcgaaggtacggtcgtgagcctcgggcgcggtacggataaaccgttcgaggtttacggacatcccgacatgaccggctgcctgttttcgtttacgccccgcccgactgcgggagccaaacatccgccgctcgaaggcaggctctgccacggcgtcgatttgagccggatgccgctcggcgaagcccgggcggagggcctgaccctgaagtatgtgatcgaagcctgccgcaacctggggctgggcgataagttttttacgccgatgttcgaaaagctcatcggcgtggggtatgtccgtgaaatgatccttgccggagcttcagaggccgaaatccgagcccgctgggcggacgacgtgcggcgcttccggaagctgcgcgggcgctacctgctttacgaataatctgacaaccgccccggaatcatccggggcggttgtcagatgaaagcgggatggccggtgcttgatttggcgtggaaatagtgacgcctgcttcgttgcagccgccccgccggatcgccgcctgccctcccctttacggggaaaagggtgcaggtactctttcccccgtaggtcttgcaacgcctgtccggaaaaatttcccatgcccaagttcgccgcctgccttgcaacacggacatccatgtggcgagggcggaaaccggcaggcaaaatatttcggtttctatgctttccggtctttgtgactattacggaatttcccgcgaagagtttttcaggggcgtcgggtcggccgaataaaagcgtcccaaaagggacgctttttcgttaaacgacctccgtgatccggtcgtcctcggtgacgggccggatgacccggcacgggttgccgaaggcgatgaccccggccgggatgtcgcgcgttacgacgctgccggcgccgatgaccgtgccgtcgcctatcgtcacgccctgcatgaccacgcagttgccgccgatccagacgttgtcgccgatggtgataggaagcgagcgcatgacgcccgcgttgcgctggtcgggcagcagggcgtgcgtcacggtgtagatgcccacgttggggccgatgaatacgtggttgccgatggtcacgggcgcttcgtcgaggatcgtgaggttgaaattccccgtaaagtcgtccccgattgaaatctgcgacccgaaatcgcagtggaacgggctgtggatgcagaatgtgccgcccgtgcggccgaacaactgccggatgatcgcattgcgttcctcctcgcggctcgggggcaggctgttgaaccggaagactagttcttcgcagcgttgcagtgcctccctgatctgcggcttgcgggcgtagagccacatgccggttttcatcttttcaaggtcgtccataattttatttttcgtagttgtttatttctatgccctgtcggacgcatttcccgggtttgccgtgccgcgtggctaactctcctccgggaaggggagggcaggcttgccaatgaggccacaggcggtgggcaacagcgggcggaagcgaaaatccgggtcggggattcctgctatgtcgcgttgtataatccgctcattccgagctgaaatattcgtatgccgccctggagaccgcagcggcgatggcagcatttgcggcgtcgttttcttccgattcggtgacgaatacggcgatgcagtagcggcatccgtcgggcaggagcacatagccggcatcgttgtccgcaatgcggatgccttcggccgtgcggtcggatgagccggtcttgtgtccgatcacggttccggctggcagcccggctttcagtttgttcgttcccgtcgttgcctcgcacaacaaccgttgcaggagagcgttgtactcccctttgagcagcctgccctgcaggaacaggtcgaacagtgtacagacggacgaagggcgtgccttgttgacccgctggttcccgatgccgcggtgcatttcctcctcgctggcggcgatgcagatgccgccgatccccagcgaacggacgtaggcctctacggcttcggggccgcctgcttcccgtagcaggatgtcgcaggcgatattgtcgctctccgacaccgtgtagcggagcagctgtccgagcgtcagcgtgcctccactttcgggcaatgaatcgcgcatcgggctgtatgtgccgggtaggagcaggtcgggcgtgatgctgatcggctgcgtgagcggtgtgccttcgcgctgcatgcggtcgagtacggccagcgccacggggaatttgaagacgctcatcatcggcagcagggagtcgtttcgcgcgactgtcttcccgtcgggagtgcggattgcgaccccgacgaaggctttgtgccccgacacgatttcatccagccgggattcgaattgtcgtgtcgccgtatcgcaagacgctgcgagaaccgacaggcataggagcaggagttttttcataggctggcaggggataaaaaagcacaccttttcggggtgtgctttttttcggatttctccgcgtcgcttatccttcgatgatagcctcgctcgggcaaacgccggcgcaggtaccgcagtcgatgcacttatcgggatcgatgacatagatatcgccggccgagatcgcttcggtcgggcactcgccgatgcaggtgccgcaggcaacgcaggaatcagtgattttgtaagccattgtgttaaaaatttattgttaaggtgtgtgttgtgtccggcaaatataggaacttatttgataatatcaaaacccgtatagggaatcagcgcctcggggatgcggatgccgtcgggggtctggaaattctccagcagagcggccacgatacgcggcaatgccagcgacgagccgttgagcgtatgcgccagctgcgtcttcttgtcggcatccttgtagcggagtttcaggcggttggcctggaacgactcgaagttcgacacggaggatacctccagccagcgtttctgcgcctcggaatagacctcgaaatcgtaggtcagcgccgaggtgaacgacatgtcgccgccgcacaggcgcaggatgcggtagggcagccccagcgacctgacgatcgactccacgtgcgccaccatgccgtccagcgcttcgtacgacgcttcgggcaggctcagctgcacgatctcgaccttgtcgaactggtgcaggcggttcagcccgcgcacgtccttgccgtacgaaccggcttcgcggcggaagcagggggtgtatgcggtcatctttaccgggaaatccttttcgtcgaggatcacgtcgcggtagatattcgtcacgggtacttcggccgtcgggatcatgtagaaattgtcggccgtggcgtggtacatctgcccttccttgtcgggcagctggcccgtgccgaagcccgaggcttcgttgaccatgatcggcggttccacttcgaggtagccggcccgggtgttgcagtcgaggaaatagttgatcagcgcacgctgcagacgggctcccttgcctttgtagacggggaatccggcgcccgtgagtttcacgcccaggtcgaagtcgatgatgtcgtatttgcgtgccagttcccaatggggcagcgggttttcgggcagttgggtatagctttcgaccagcttcacgacgaggttatcctcggcggtcttgccttcgggcacgatgtcggccgggaaattgggcagcgagacgatcgctgcctgcaactcctcctgcacgtcgtgcgattcggcctgcaggcggttggatttttccttgaggtcggcgacgaagcgcttgcgctcctcggcttcgtcgcggcggccctgtcccatcagcgccccgatctccttggcggctttgttctgcgctgccagcgtattgtccagttcggtctggatggccttgcggcggtcgtccagcgtttcgatcctggcgatgaccggtgcggcgtccactcccttcttggcgagcttgcggatcgcggcctgcttgtcatcgcggatttgctttatcgtaagcatggtatcctgtggttttttgtgtattcgtgtttacaaactgcaaaattataaaaaacacgccaacttgcactcctgtcgctctgttttttgcctgtttcatgaaaaaaccgggttcccgtcgtgtgcgggaacccggttttcatagggttgcggaaccggtcagagcctgtgcagttccaggccggtgcggagtgtcttgcctgcggcctgtttccgggcatccccggcggatgccggtgcctgggctttggcggcgggcctgatcgtcgtcggaagcaggtcttcgctcagcaggtaggtcgtgaaccgctgtccgtccacttcgatggactgcgtttgtgccggggcggcgtttgccgccgcggacgcctgtttgagcggtaccatgctgatggccgaatagctccgcgaacccacatattcgcgcaggtagctcgaactgcttgcctgcggcgtgctgaagagcaggaacatgtagctgttgatggcgttcttcgagtaaggacttgccgcccagtagagtttgtctccgatgtagccgatggccaggctgttgtcgccccagtaaatcatcagcccgtccgagaacccgaggcgtgcgtagttctgcccgtatgtgccggccgcctgcgtctcgacgatgagcatgtgcttctccttgtcgtagtagccgttcagttcgggtgcgaagtcgcgcatgtcggacatgcccttgatgaggacgtcgcggtcgttgacgcgcgtgatgtcgatacggtagttgccctgcgtgtcgttcgaaccggccgttatggtcgccgtggcattgaatgcgcccaggaagtccgccatggtcttcgtctggtcgaaatccgaggcgaaatagccctgtgtcgagccggtcttcgatacgaacgccgtatcgccgaacgagttggtcatcagcagggcgagaacatacgtgctgccctggtcgagcgtgttgaacgccgtggcgcgtccttcttccgagttgagctcggcgatcatctcctcggcgatgtcgtacccgcggtcagcagtgagttcttcgagggtcatcccgagtgcctcgcacaggtaatcggcgatgtcggtcttgacgcagaggtatttcatcgtggccacgttgcttgtctgcatctcccagatgagcgtgttgtagggcgagtaattcaggttgtcggtcggtgcgtagaacttgaattcgttgaccttgattccgtattctttctccgggtcgcacgtgaagcgctgcgagtagagcttgcacgggttgtcgatcgagtcgtaggccagcgcgacggcggtgtagtttcccttggggacgttccataccgatgcgtcttcgctgtacagcgtcacggtggggacgacgccctccagcttgtcgtcgatgagctgctggcggatctcgtcctgacgctgcgtgtcagccgtgatgtcgccctccacgaccgaagccttgtagaacttggtgtagctgttgggcgagaagtagagcttcggggcgcggaaccctgtggccgtggtctcgatgccctggaactcgatgtccacgatcggcgtcgtgtcgggttcgctttcgaagacgagtttttcggtgccctggctgaagtatcccgacgacacatagtagatcaggtagaacgagaaggtgtccttaccgtcgaacgtgcaggggtaggaggcgtaggcgctctcattgcccgtgtactcggccatgtcggccacatagacgtactcgttgtagttcgagttgaaatatccgatcgactgtcccgggacggtgcaggtgttgtcgtcgtggaggatgaacttgaacgccacgccgctggcccagtccttcaggcggaagatgttggctccgacggccttttccacctccagccccgagtcgcgtccggtgtaatagagcgagtagtgataagtggcgagttgctgcacctgcccgccatcgctgccgatgcgcatgtagggctcccaggtcagctcgtacgaagccgaaagggccaccttgtcgctgaactgcgaaacctgcgcgccgtcgtcgccggggttgacttcgcgtttcgagatcaggagcgtcgttttgtagttcgagcccatgatgaaattcgataggtcgacctccacggggacggtcaccgagtatttcccgtcgggaatggttaccttggatggtactttgaaccgggtgaggttgttcaggtcgctggtcttctgcgccaggtataccgtgtaggagcctcggttgcccgtgcgggctatctgcacgtcgatggtgccgctctgggcagcctgtgcaaactccttttcgatggacgactggatgaagtgtatctctttcgagtcgtccttgttggggttgtagtaggtgccttcctgcgtcttgctgcaggccgcgccgaacagcaggagtgccacacccagatatttcgatatgtttttcatagtatgcatggattaatcacttcttaacaatgcgttatcacgggttttggtcttcctcgttgatattcgggttggcgttgatctcatcctgcgggatggtcatcacccagtcgtacgtgtcggctttggtcaggtcgacgttgcggcggctcatgcccgagaggcactcttccgagaagccgtcgtccgcacggcggtcgatgccctgtcccaggcggcggacgtcgaacaggcgcccgtattcgccccaaagctcgatgcggcgctggatgaggatgtcctcgagtaatgatcccgtccatgtcgtggtcgtggctcccaggttcagcccgctgcggttgttggcgttgtaacgcgtgtcgcgttcggccatgaccgtgttcatcaggtcgcgggcgacctgtacgttgttcggcaggttctccgagcggagcgccgcctcggccgccgtgaagtacatctcctcgacgcgcatgtagatatagtcacccagccacgacgcgacgttgctgaacgcgaatttcctgcctacatagggggcgtccttgtcattgggatcccaccagtcgcggcggacatcggtcgggttcatgcggttgtaaagctgtttgttgatgactttggccgccgatttcgcatactggccgtcctggttgtccatgtgggcgaagaaactggcataaccgccggcctggtctgccacctggatgcccgctccccacatgacgttggagctgttgagcgagttcatgccgcccatcaggtcgctcttggtgccgaccgcatagccgccttcgtcgatcacgcgctttgcggctgcataggctccgtcccagtcgccttccaccaggcaggcgcgcgacttgatgcccagcgccacgtagagggtgatgtgcgatttgttgcccgtcgacagcgagctctccctgccggtttcgaggtagccgatcgccttgtcgatatcctcgtcgatgaggccgtagacctgttgcagcgtagcgcgcggctgtccgccggtgtcgatcgaagtgcccgtggtgtagaccggtacgcaggcttccgtccagcgctggcggccgttcatcgggtcgtaaggcgcacgtgagaaccaggtcgccaggttcaggtagcagagtgcgcggatggcgtaggcctgtcccacgacataggccacgtcggcctggctgccctccatcgccggggctgcgtcgatgatgtagttgacattggatatccacctgtaattggcgtaccatacgtcgtaggaacggaagatcgaactggtgtagttggacttcatgttgtaggtatggtcgtgccagaaccagccgttgccctgcgactgcatgatcaggtcgtcggccatgacgtcgagcgccaggttgtaggctgcgatgccgaaacactggtgggtattgcccgtcgtagaccatccggccgtccacatcgagcggtaaacgccgttgaccgaagtgatggccgtcgaagccgccttgagcaactcctcggccgatcccgagtcggtcggggagaattcgagcatcgactggctgcacgaacccatcgtcagcgtcacgaacgaaataatgctataaaatatttttttcatacttgtttcctcccttggttaaaagttcaaatcgaggccgaaggcgatcacccgcgacggggcgtagctgtaagccacgtttccggtgaagttgtactgcggatccatgccgtccatgtggttgaacatggcgatgttgtcgaatgtggcgtagatgcgcagcgactcgatgtccagtttgcccagccagcgcttgggcagcgtgtagccgattgtgatgttcttaatggcgaagtacgaggcgctgatgagcgagttgtccgaggtggcgtagctgccgccgacctcgagcatcggcacgtctgtccggtcgccaggtttctgccagcggcgtttggcgttcttatgccagttgttaccggcgtactgcacgttcatcgtcccgctgtaaagcccgtcgtagacatatccgccgatcgaataggtcgtcaggaacgaaaagtcgatgttcttgaagatcgtgaagttggaaccgatgctgccgaagagcttcggctcgcggctgccgtggtaatacttgctcagcgaagccatcgagacgttgtcggtgatgtattcgtcgcagcgtacgttcgtcagcttgccgttgtcgtcgaccgactgcgtccagtaggcgtagtagagctgcttgcccgttgcggggtctacgcccgccgtcttcggaaggtagaacgtgtagatcggcttgccgacctcgatcacgcggagccccgaggtgatgacgtcctggccgccggtcagccccagcaccttgttgcggttgaaggagcccatgaccgttgcgtcccagcggaaattgggcttgtcgagcaccgtcccgcggatcgtggcttcgaggccctggttgcgcatcgaacccgcattggcgttgtagttcttgaacccggtggagagtgccatcgggtactcgagcagcatgtcggtcgtcttgcgggtgtagtattcgaccgaaagggcgaggcggccgttgaacatcgtggcttcgatgcccgtgttcaggttggcgttcttctcccaggtgacggacttgttctccagggtcttgcgcatggcgccggcttccgaggcgttggcccaggtgtagtcgtagtttccctgccaggcgtagtaggttcccagattgtcgttgccctgcacgccgtacgatactttcagcgtcaggttgtccagccacgagcgggcaccctccatgaactgctcttcggagatgcgccacgatgcgccgaccgaccagaaatgtccccagcggtcgctcttgtagaaacgcgacgagccgtcggtacgccagctggcgtcgatgtagtagcggtctttgtaaccgtagttgaggcgcgaaaaataggactcgatggccatgttgtgcgaatagctgctgttctgggtcgtcgtcaccgcagggtcgagctcgtcgatgccgtccacgatgcccgtcttctcgcctttggcgtagttgtatttgtaacggtagtattcgtggcccagcagggcgttgaccgagtggtctccgaacgtgcggtcgtaagtgagcagttggttgaacgtgtagctgatcgtgcgggtattggtcttgccgatcatacctccctgcgtcgctgcgttgccgtggtatttgttgtatacgaccgtaccctggtagtcgttgaagtcggtacccatgttgagcgagaacttcagtccgtagagtttggcgtcctccctggtcgtgccgaatgtggcataggtacgggccgaaagggagtttcgcgtgttgtaggacttgttgttgtagagctcggccttcgagttgaaaccctgtgccgaggggcggttggcaaagccgttgtcgtcctccgaaccgtattcgtactggcggttgccggacgcgtccagcacgttgctgccggccatgtccttcaggtagacgggatagacgggcgccatgaactgcgccgtgtaccagacgttcgaggtgcttgtgtcagtgaagctcaggtagtccgattcgctgtgtgcgaagttggcgttcatcccgatcttgaaccagtgcttggcctgcgtatcgacgttcacgcgtcccgtgtaacggttgaagtcggtattctggagaataccgtcctccttgtaatagcccagcgatacgaggtagttcgaacgctccgacccgccgttcaccgagatgatgtgctcggtgcgtatggccgattcgtcgctgatctcgtccatccagttctcattccacgcggccttggcgtccgggcggatcctgcccgtcgtctggtcgatcagcgtttcccacgtgtagtttttgtaggggttgtaatactcggggtttttcagcccgccgatctgctggccgaggttgttcgccgcatagcggctggcaccttcgaaatccatgcccgtaccgtactgggcgctgttgcgcagcgcttcgtagctcatttcgacgtaatccttcatgttcaccaggtcgtaacggttcagtgcgcgcgaggcgatgccgacgttacccttgtacgatatgcgtacccggtcgtttttgcccttcttggtcgtgatgacgatcacgccgttggcaccgcgcgatccgtagagcgcaccggccgatgcgtccttgaggacggtcatcgactcgatgtcgttcgggttgagcgagctcagcgagccgtcgtaaggcacgccgtccacgacgtagagcggcgtggatacggcattgatcgacccgatgccgcgtacgatgaccgaggcgccttcgcccggctggccgccgcccgaggccacctggacgccggctacggtaccttcgaacgatttgctgatgttgcccaccacgcgcttctgcaactcgtcgcccttgactacggccgccgagccggtgaacgactccttcttggccgtgccgtaggctacgaccatgacgccttcgatctgggcggcgtcttcctgcattgcgatgtcgacctgggtgcggcctgcgacctgtaccttggccggtttgtagccgatgtaggagatcaggagcgtggcgtcggacgggacgttggaaagcgtgtagtgtcccgtgatgtccgtgctggcgccctgcgtagtgccctccacgacgacattggccccgatgacgggttcgccgttggctccggttaccatgccgctgacggtggcattctgcgccgaggccgacgccatgcacacaagcgacaccatgcaccagagaattgctgctatcttgttcatacgtgtactcttattttaaaatctgcttgttgtgaatgattgtccagaggtcgccttcgggacgtgcgtctgcgggcagcgtgaaactttccatcgggaagatgaactttccggggttgtcgatcggcctgccgacgagcgatctgagcggtgcggcgctgcgggtagccgcctgcgtcgaggcgtcgggagctgcgtcggtcgtcaccgaaccgtatttggtgagggcgtcgccgacgctgttctttgccgtgaccatgaacacataggtcgtcgagggcttgatgccgttgctctgctcgaagacgatggcgaagccgttgccgttgatgtaggggatgaattcgtccttgatgtccgaaccgtactcctcgatcagctgcgggtatttcgactcggcaatctcagcgatggcggtctgcggaaagatggcgtatcgagccgaggaaacggatacgccctgcatgaccccggcgatggtgttgtgtgtcgggccgtagtgctcgtccttgaccggccgcgccatgaaccaggtggccgacgaggtgctggtcttcgtggtgacggagttgacgcagagcgtttcgtctccgcccgacgaggttgccagcgagagcagcgtgtaggacgttcccatgttggccgcggaaaccatgttgtagccggtggtgctgttgaccatcgtgagcagggattcttccaccgggtagctgtaatcgtcgtccttgaggaatgcggtgatgctctgcttgtcgttggcatcggggaacacttggctgaatagcttggtcgtgagcgtacggtaacggacgctggtcacgtcctgaccctgccagagcgtccatacggagttcgtccatccgtagccggtcaatccggcataggcgttggtgatgtagaagctttgcttgaaccagtcgctgccgccgtaattcgggccgtcggaataaccgtcggacgtggtcttgaactgcacggacgaaagtccccgcgtgatctgtcccttgagattcatgccgaaggcgaacgccacgtagctaagttcgggcgtgagtcccttgacctggatggtctgggtacccgacttgagcagcgaggccatggccagctggatgctgatgccctgctgctgcgcgtattcgagcgcatactcctgataggctgcgatgatctcctcgggggtgttcttgacgaagagcgtagccgggatgacgtcgtagaaataagtctcgtcgctcgacgcatagacgttgaactcgacggcatccgagatgaccagggtcggggcgattaggatcgccggtatgtcgtcggccgaggttctgaagggcagctcggcgggctccgagttggtgaagcgcgtcgcatcgcccgtcatggcgcggaggctgaacgtgtagtcccggtctttcgacaggttgcccagcgtgaccatgcggtcggtggtggtgtaggtctgcccgccgatggtatactcgtagagtgccgtctcggggacttccgtccatgtgatgagcgtcttcgaggcataggcgcagccgagcgtgatcttcggccggggaagctgctcgaggtcgtcggtcactacgtggacgtaggtatagggcgattccgtattttcatccgcgaatttcggggttgccttgactgcgacgacatattctttttggcgctccaggtcgccgaacgagagctggcaggcatcggtggaggtctcttcgctgccgttgaacgtgtagacgtaagcgcctgcaccctctacggcctcccagcgaatcttgaagcccgtggtggtcagctcgctgacaataacctgcggctgtgcgacgggggttttgccggacgcgtcggccacgtcgtcgtccgacgagcatgcacacagtccgagaaggcttcccgcgaccagggccgcgtatctgtaaaaggttttcatatttctgtttctctattgcgttagtgaatatgtcattcgacggtcacttcgaccggcttacggatagcggcgccgtccgaaacgatgaccgtagcctctcctttccggagccccttgatctgcatcacgccgccttggagcgagactccgatcacgccggggtcggagacggtgtagcccaggatgttggcggagaggaaatagtcgcgcaggtcgaggctcaccgtggcaccggccgctactttctgtgccgggatgccgtccattttggcgatggtcagcagcagtttgtaggcgtcgaggcgcccgatgcccatcatgccttcgtatccggcgtagttgcctgtgcagaagcggtctacgggttgcgtgctgctcagcaatgcctggcggagcatctcgcccgtcaaccctttgcgcttttcggctccgtaatagtagctgatagccagggcgcaggctcccgatacgtgcgggcaggccatcgacgtgccttggatgccttcataagcggagccgccgtccgcagcgacgctcgtgctgtaaacaccgccgtaggcgttgctgagcatgaggtcgccgcccggtgccgacattgaaacccatttgccgtagttggtatagtaggagggggtgccgaggtaactcagggctcccacgctcactacattggcatcggcggcggggtagcagttttcgttcgaggcgtcgttgcccgcagcgaaaacgacgatgccgccggccatcgggcccgtttggttgccgttttcatccagccccgcatatttgttgaaatattggatggcgcgggtcagcgccgaataggtgccgttcttccagtcggtttcggagattgtccctgcggtgtatccccaactgttctggcagatcacggcgccgttgtcggccgcgtatttgaatgcgcggatctgccccgagagacctgcgcccgaggagcccgattccgatttgccgagtatctcgcatgacatgatcttcacgccgtcgttccggcccgagccgcccgcgatgccgttgacaccgatgccgttgttgttgaccgcggcgatcgtaccggccacgtgggtgccgtgcatgagttcctgcgagaagttcagctcgcccgaattgttggtgaagttgaacccgtagatgtcgtcgacgtagccgttgccgtcgtcgtcgatgccgttgcccgggatttcgcccgtgttgacccacatgttagcggccaggtcttcgtggtcgtatttcacgccctggtcgatcacggcgacgatcacgtcgggattgcccgtcgcgagctgccatgcggcgtagacgttggcatcggcacccatacgggtctgctgcgcgtagacgttgcccgtgttgttgtagtgccactgcatgagctgtgcccgctcgtcctcgttgaaggggaacggtatgtcgcgcacctcgtcgctgacggcacgcgtcgggctcggatccccggtcggggcgggggtgtgcatgtaatccgacgctacggccggcagcgagtactcgatgatggcgatgtccttgcaggccgaaagcattctggccatctcggacgttgggacggacgggtcgtattgtgcataataccacagatgcaacccttccttgcgggtgcgttcctcgaagcgtccacccgccgggaaaagtcgttcgaacctgacggtgccgaccgatgtgagcacccggtcgatctcgtcgatgccgctgcctgccggtacggcgcccgcggcacgggtcttttctacgatgcccgatgcttcgttcttgaatttgaggatgatctcgccgtcgatggccgccgaggaggcgtttacgatgacgggccctgcggtgtcctcaccgccgtggctccccgtttcttccttggcgcacgctgccaatgcgagtacggctgcggccaggagtagcgatttaaatatatgtttcatgaataatcgtattttaatgttttactcctttacgcagcgtacctgtgccgagtaaacatgcgctccggtctggtaaatggcccagttgtcgttgaaatcctggcggtagcagtcggcgctggtcgtcacgggggtgggctggcaagtccagtaaaatgcctggccgcccgtgtagttgtgcgtcgtcttgttgatcgaaaggtaatagacgttgccgaccatcgggtagtagtcgccggtgtttttccagcggcggccacagtcttcggccttgttccagtcccacttgtcgctcaccccgttctcgtcgtagtcctcgaccgggcccccgttgcgcaggctcgtgttgccgctggggattccccagaggttgctgccgggaaccttgtaacctacgggacaggggtcgaagatggttttctcggggccccacaggcccgagtgggtcaccttttcgtccttgcttgcgcagtaccagttgtagtggtcgctgtaatagggttgcaggtaggtcatcgggttttggatcgcattggggatatttcccgggggcgtggtcagcggcagcgtcgtcgcattgaatatccaggaacccgagccgttgccgacctcatagttggtttcgttgtaggccgggatgttgttgctgtcggtatccgcatggtaggccgaacgcgccggcatgaaggggtctttgcgcccccactggtagaacatgccgcggttgtcgacgtccatcggctcgttgttcagcgcaccgaggttgcggtccatgatctgtgccaccacttcgttggccgggttgatgtggtcatgcgcagtgatttcgtcgtcgcagacccagatatgccaactccagaggatattgccgttgatgtccttcacggcgatcacggcgttgccctgcgagcgtccggtcgcaaaggccacataaccctccttgtagacgggcgccccgtcgatgatctcgcgcgacatggtcttgtccccgtcgttgcgcgactcccatagcagttctgcagccgccacgccggatattccggtgccgtaggccgcgatgtagtcgctccggccgtcgcccttgccgttgcccttgaccgaagcgtcgaatttataggctttgccggtgtgggcgatgtagcagttcgaagtgccttcggcgctgaggttgatgctccgctcggcacgctggacgagcgaaacggtcgcactgacctggtcgccgtttttctcgccgctgacgacgatgctgcccgtgagcgtttcggggccggcattgatcgacgtctcgacggccagggtattgtcctccttgcgggtgacggtgaaccagtcgcccgtgctggtgtaatcccaggccgcggcatttgtcgccacgacgatcgaaacgcttccgccgtcggcgtcgaagatcagtttgtcgctcgacacctccacataagccggcccgtcgggggtttccggcccgatcttggtggtttcggtgcagcctgccagtaaaatcgtcagcagcactgcgatgcaatatgatatgatatatttcatgttctgaagattttacgtgttactgtttccaggcgtcgggtatctgggcgtagtcgctcagctgcgtgcagcccttgaagcatcctgcggtgctggtgagcgccgtgaggccggaagccggattgttctccgtggtacggtcgtagaggtggtattttattccgttgacgatcgtatagggcgattccccgctcagcgacgtacagcccgaaaaggcgttcgtaacactcttgagtacggtgcattcgtcgaagatgtcgaccgggatgcccttgagcgacgagcagtcgcggaacatgcttgtaattccggtgagcttgcccgcgctgacgagaaggttttcgccgaccgtttccaatgccgtgcaaccgtagaataccgaaccgaacgtcgtgctgcccgcgcagttgaagacatttgagccgaccttgcgcaatccggtgcaatcgcggaatatgccggtccaggtcgagatcgtcgtattctccctgaacagcccgtcggggatctccttcagcgaggtgcacttctcgaaggcatacatgaaggtggtcgacggggctttcagcccgctgaatgcatcgggggcgatgctctccaggctcgtgcagccgctgaacaggtacgacagcgtcttggtcttggtcgtcgccccgaacatccgggccggaacggctttcagcatcacgcagttctggaaacatttggtaagcgtcgttacgtcggtgtttttcatgaacatcccttcggggatcgtttccagagcagaacagtctatgaaggcctggtcgaaagtcgatgccttggccagtccgtcgaacatgcctgcggggatggctttcagcgccgggcatttcgagaacaggagatcgcacttgaccgcagccgtgctctccccgaagagtacgccgacctgctggagtgccgtgcagccttcgaaggcgttggagtaaaccgtgaccttggagttcgccgagaagaggccgtcgggcagcgaggcgaggtttgcgcagttggtgaataccttgccgaatgccgtgatctccgggttgcggctgaacagttcggccggtacggttttcagcccggagcctgcgaagaggctggtcgcggtcttgagagccggcaattgggcaaagaggtcgcccggaacgctttcgagtgcggtgcagttctcgaacaggttgccgacgctggtgatcttgggggctccggcgaatgcgtcgggcgatacggttttcagctgggtgcagtccttgaacatcgaggcgatgctcgtacacgaggtgcagccgttgatgatattgccgccgatctcttcgagtgccgtacagccggcgaacaggctcgagaacgaggtgaccttggtcagccccctgaacagcccttcggggatgctcttcagcgcggagcaatcctggaatgcgttggcgaacgaagtgacgttcgtattggttgcgaagaggtcggaaggcagttttgccagcgaggtgcaacccgagaacgaggcgctgaactgcgtgactttcgtgaagccgtcgaacagtccggccggaatctcggtcagcgaggtgcagcccttgaaaatgttgttgaatgccgtggtcgtgacggtgtcgaacgccccggtgttcgagaacagtgcgcccggaatgctttgcaactcggagcatccgctgaaacaggtcatgaaggtcgtcaccttcgagcatccggcgaagagctcggccgggatcgaggtgatcttcgtggcgttgaacgtgcttcggaagtccgtgcacttcttgttgttggcgaagagctttgaagggatggatttcaggcccgagccctggaacgtatagtagaaactgtcgcactcgggctggttggcaaagatgttttccgggatggtttcgagggtgaggatacccgtgaataccgaactgaagtcgtcgatcttcgggttcttggcgaacagtttttccgggacggtcttgagcttggtgttcgagaagcaaaccgtgacgttgctcagttcggggttgtgtgcaaagaaatcctcgtcgacctcttcgagcgacgtatatgcgaaggcgtttcgtaccgattcgagcttcgcagccttgtggaacaggtcggccggaacttttttgagctcatatgcgaactggaacatgctttcggctgttttcagctcgacggcatggtcgaggaacccgtcggggatttcctccaggatgtcgcagtggttgaaggcttcgtagaaagtcgtgacctgggcgaacgcctcggtctgatccgtggccactttagtcaggaacgtgcactgtttcagggcccctgccatcgacgtgagcccggtgcgtccccagttgaatatttcggtgatctggttggtctgggcatagttgtaacccagattgagattggtgctgttgagcgagggcacggtgcctttgaccgaaacgacatagtagtccggatcggtgtaggtgtgctgcgggaacgccgtggtgacattctcctcgatggtgccgtcgccccagtcgatcgtggcgttgatcgccttgtcgaagggcaggcgtgcccgcaggtctacggcacttacgttgagcccgatgatgaatgcatcgaagtcgaagcccgtctgggaaacggtgatcgtctgttcggccatgttggccttgccgtcacccgccgtgatggtgatcgtggcggagcgcgaagatgcatcgggattgattatggaggagacctccagaccctcttccgtgcgttttacagtgagccagtcactgccttcggtgagggtgtattcccattcgaaattggattctacgctgagttccttggctttggtgggagtggccgcgaacgggacggtttttagcgatgtgctgatgaatgcggcacggtcctgcgtgacgcggattgtttcagagaccgggtttcccccccccttgccggcaatcagctcgaaggtagtctccctgtcttctatttcttcgttggggtcgagcgtaaccgtaacgttcttgccgtcgcgttcgacgagcagccacgggcaggccttggtttcgtaaacccagtcttcgtcggtggacaaaacctcgaacgaggcggtcagtttgccgcgtgccggaatctggaagttgttttccgaagcggagatttcgagcgtgccgtaggcattttgcgaaacggtgatcgtcgcggttttgtcgccggccgtcacggtgaccgtcgagttctgcttctcttcgaccttgttgctttcgcagctcaggataagctggtcggccacgtcgtctttttcgatggtgagccattccgcgccggtggccgtgtatttccaagccacgttggtctggatatctacgacgacctcgccgcccaagctcttgaagccgatggcggcgttgagtccgtcggccggggtgaaccaggtgttcttcgacgaaatgcccagttccgcgatgacttcggacggttcttcgccgggtgtcggattgatataggtgatggtatcctccgagcaacccatcatgccgagcatggaaaccgccagtatgtagatgaattttttcatgcgtgttgctgtttaattgttgatttcgggatagacggggaaactatctgccggggacgtgacggctgcggcagcccgggtgacgttcgtcgtggccgaagggtcgtcccactgcacgaggtacatcgagccggtggcgtagtagacgtcgctgaacgaaacgtattgctgcgactggtagccgatcaggcccagggtcgagtaaccgctgtcgaagccgctcagcaggattgccttgcgcatctcttccgcatcgtcgttgtagccttcgcccagcgtaccggtcagcgaaccgccgacgaacgaaccggtgttcatgttgatcgtcatcaggtagtaggtgcgggtgacggaggcggatagctgtacctggaggcagtttttgcccagttcgatggtcagggccccggtctgcttgtcataagctgcctcgaccaccgtccctttgacgaaaaggtctttgatgtagacgcttttgcggtactccttctgttccacggtgcagaatgtccccgttccgctcacgcccaggggtgagccgccgtaataccagttctgcgcgaaaagcccgtagtatcccaggagtttgtaatagcgattctcggcatgtgaatcctgtgcgagcgtcacctcgcacgatttggtgtccttgccgttggacgaactgaccgtcagtgtcgccgtgcggtgtgcatcggggttgcccgaggtcgagagcgttacggtgctgttgaccttgttgcagtcgatcgacagccattcggcgtcacacgttgccgtccattcgccgttggttatgaccgtgaagatgtagtcttcgccttcggaatcgaacgagatttccttcggggcggtggttgacaggagcaccgtttcgagcgcataggcctgacggacgtcgacctcatgttggtctgcgtccgactttacggtgattttcgcattacggatgtcgggggtggcattgctgcccacggagatggtcaggtagtcgccctcgggatgcagtgtcacccaaccgtcagggcaggtcgccgtccattccgacgggcttgctaccgagatggtggtcgttccgccttccgtggcgaacgcgacactacttcgggagagaacgatcacatctgcgatctcttcctttgtcttatcgtcgcaactactcgctgcgaaggcgatcagacagatcaatagtgtaaaacatcttctcataaattattaattttgggtaaagtgtataattttgcctgagtgttggcgggtggacttgtgtgttcttgtaaaatattgcatgtttaatttaagggaaaccaaacgaacaggcctgcaatataaggaaaaaacaataatagtatgctgaatgggtgcaaaaactttttaattttatcctagttatgtgtctttgatcggggtgtttgtgatgtaatattttgtcgtgtaaatatttgcattgttttaagccgggtgcttggggtgggttgtgttgagttgtgaaatattgacatgctgtctattttgtaacagatatttttttgtcatcatgctgtgccggggataaaaactattttttcggggccgcaagtttttcggggccgcaagtccgcatttgtcgcggattttgttaattttgcaaaaaataatgcgttgaaatccgtcgaactactcgctcccgccaaagatttgcagtcggccgtcgccgccgtggactacggtgcagatgccgtgtatatcggcggggctaagttcggagcccgttatgcggcgggcaacagcgccggcgagatcgcccgtgtggtggaatatgcccaccgctacggagtgcgggtgcatgccacgctcaacacgctgatctacgacgacgagctggaggccgccgagcggcaggcccgcgaactgatcgcggccggggtcgatgcgctgatcgtgcaggacatggcgctgcggcgcatgaacctgccggtcgagttgcatgcttcgacgcagatgtgtaatatggcacctgcccaggcgcgtttcctgggcgagtgcgggttcgcccgggtgatcctcgaacgggcgctttcgctcggcgaaatacgggacatctgcgctgcgaccgcggccgaggtggaatgtttcgtccacggggcgatctgtgtcggttacagcggccgctgtttcctctcgcggtcggtgtccgaccgcagcggcaaccgcggggcgtgcagccagccgtgccgcctgacttacgacctgaccgacggccggggacgtacctatatcgccgggaaacacctgttgtcggtgcgcgacctgaacctttcggcgcatatcggcgagttgctcgacgcgggcgtcacttcgttcaagatcgaagggcggctcaaggatgtcggttatataaagaacgtcgtggcctactaccgccgcgaggtcgacgcggcgctggccgggaggccgcatctgcggcgggcttcagccggggagagcatcccggatttcacgcccgatacggccaagagcttcacgcgcggagagtcggaatatttcttcgcgggcaagcggccgggcgtggcgtcgttcgatacgccgaaggcggtgggcgagtatgtgggccgtgtggtgcgggtcgaaaagaacaggttccgtctcgatcggggcggtttgctcgccgcgggtgacggcatctgtttcctcaccgaccgggggttcgcaggcaccaatgtcaacgccgccgacggcgactgtgtgacgcccaaccgcatggaaggtattgtgcccgggacggaggtctaccgcaattacgaccaccgtttcaaccagctcctcgcccgcagccgtacgcgccgcgtgatccccgcctcggtgctggtcgaagcgacggtagggggtgtcaggttcagctataccgactgtgagggggtgacggcttcggccgcacgcagcgtcgccctggaacgggctaaaaatgccgcggccaataccgcggcattgcggacgcaggcggtgaagggcggcgatacggtttttgccgtgcgcggggccgaagtgcggggcggcgactggttcgtcccggcgtcgctggctgcggagttgcgccgcgaggggctcgatgcattgtcgaaggcccggtcggagcgcggcatcggacaccggatattgcccgaaggcagggcggaatatcctgcggaatgcctttcggcggaggaaaatgtcaccaaccgcctcgctgaggcgttttaccgcgaccacggggtcgggcggatcgaacgggggctggatcttgcggcttcgacggcggggcgccgcgtgatgcgttcggcctactgcatccgccgcgagatcggcgagtgcctgaaggagcatccccgcctgcggggcgaactgtggctcgaacgcggcggttcgcgctatcggctggagttcgactgcgaccggtgcgagatgagcctggtggactgtaccaagacgaaattatgaaacctaaacgataactccatgatgaaaaaaactcttttgatccttgcggcagcgctttcgggcgtgttggctgccggcgcccagaccgggcgtgaatggcaggatcctgccgtcaatgaaatcaaccgcctgccgatgcgctcgtcgttcgccgcgggcgagcgcctgtcgctcgacggcgtatggaaattccactgggtacgcaacgcttcggagcgtccgtccggcatcggggccgtcgactacgacgatgcggcgtggggcagcatgcccgtgccggggatgtgggagctgaacggttacggcgaccccgtctatgtgaatatcggctatgcctggcgcggcaatttcaggaacgatccgccctatgtgcccgatgccgagaatcatgtgggttcctaccggcgcacgttcgacatcccggcatcgtggggcggcaaggacatcttcctttcgatcggttccgccacgtcgaacgtctatgtctgggtcaacggacgtttcgtcggttacagcgaggacagcaagctggccgcgcagttcgacatcacgaagttcgtgaagccgggcgaaaacctcattgccttgcagatgttccgctggtcggacggcacctacctcgaagaccaggacttctggcgcttcgcgggcattgcccgcggcgtggagctgactgcccgcgacaaggcgcacctcgaagacgtgcgtatcacgcccgtgctggattcggaatataaggacgccacgctgcgcgtcgaggtggaaaccacgccccgtgtgaaatcggtcggtctgacgctgcgcgatgcggcgggcggtgtcgtggcggaacatcgattgcagcctgccggcggcaaaggcgggtatgtcttcgaggttgccgacccggccaaatggtcggccgagaccccgaacctctatacgctcgagatcgccgtgtcggacggcaggggcgtgaccgagaccgtgacgcagcccgtgggcttccgttccgtggagatcagggacgcacagttgctcgtgaacgggcagcccgtgctgatcaagggcgccgaccgccacgagatggatcccgtcggcggctatgtggtgagccgcgaacggatgatcgaggacatccgcatcatgaaagagatgaatatcaacgccgtacgcacgagccactatcccaacgacccgcagtggtacgagctgtgcgaccgctacggcatctatgtcgtggacgaggccaacgtcgagtcgcacggcatgggctacggcgacaacacgctggccaaggcgccggcttatgcgcaggcacacatggaacgcaaccggcgcatggtgctgcgcgacaagaaccatccttcggtcatcatctggtcgatgggcaacgaggcgggcatgggccccaacttcgaggcatgctaccgttggatcaaggagtacgacccttcgcgtccggtgcattacgaacgtgccgtgtacgatcaggacggggccttcactgacatcatctgccccatgtactggggctatgaacaatgcgagaaatatgctcgcaacaacccctccaaaccgctcatccagtgtgaatatgcccatgccatgggaaattcgatggggggcctagaccattattgggaactggtgcgcaaatacccctcctaccagggcggtttcatctgggacttcgtcgaccaggggcttgtccgctacgagcccgacggccgtgtgtcgttcctctacggcggcgatttcaacgactacgatgcgacggacaactcgttcaactgcaacggtatcatcgcccccgaccgcacgtggcacccccatgcctacgaggtgcagtgccagtaccagagcatctggactacgcccgtcgaccttgcgcggggcagggtcgaggtctataacgaaaatttcttcatcgggctggatgcctacgaaatggagtggcagctgcttgccgacggccgtgtggtgaaggccggccgcatcggcgacctcgatgtcgccccgcagcagcgccgtgcatatgagctgggattcactgcagccgatttctgcccgcaggcgaaggaaatcctggtgaacgtggcctataaactcaaagagaagcagccgctgctcgacatcggccatacggcggccagacagcagttcgtcgtacgcgagtacgactgtaaggccggttttggccttgcggcctcggcgcgtcccgtagaggtgacccgctgggaacgcggtgtgcgcgtcgaaggggatacgtggcagatgttcttctcgcgcgacgggttcttggctgcctatacggtcgacggccgtgagctgatggccgaaggggccgaactgcgcccgcagttctggcgtgccccgaccgagaacgaccttggggcgaagttgcaccagcggcaggctgtatggaagaaccccgaactgcggcttacgaagttcgacgctgcggtcgaggacggggtggccgtcgtggaggccctctatgaactgcccgccgtgaaagctacgctggcgctgacctaccgcatcaacggtgcgggcgaaatggaggtctccgagcggatgaccgccgacaagacggccgaggtgcccaacctgttccgcttcggtatgacgctcacgatgccggcgcgttacgaccgtgtggtttattacggccgcggtgcgcacgagaactatgccgaccgcctttcgtcggccgacctggggctttacgagcagcgtgtcgccgaccagtaccacgatgaatacgtgcgtccgcaggagtccggcaccaagggcggcctgcgctggtggacggtggccgacagcgccggtacggggctgacgatccttgccgatgcgccgttctcggcctcggcgctgccgtacgccacggcagacctcgacgtatcgaattttccgccgcagcagcattccgggacgctcgtggcacgcgatgccacgttcgtgaactttgacctgctgcaatcgggcctgggctgtatcgacagctggggcgcattgcccgaaaagcagttccgggtgccctacggcgattatacgttccgcttcatgctgaagccgacggtaaagtaaccataagcatgcaaggacagttgacaccctcgttcggggattacgaactgatcgacacgggggatttcgagaagctcgaacgcttcgggcaatacgttgcccgccgtcccgaaccgcaggccatctggcggcgctcgctccccgagggggagtggcgccgcatggccgacgcggccttcctgcgcgatgtgcgcagcgacgaacgcggcgagtggcgcctgcgccccggcatgcctccgcgctggacggtggcctacgaatacaaggatatggcgcttcgtatgcgcctggggctcacctcgttcaagcatgtcggcattttccccgaacaggccgccaactggaatttcatctacgataattgccgggcgctggtttcgggcgggacgtttcctgcggatatttccggcgcggctgcggccgggagttccctgccggcacacgatgttgcagtgccgtcaggcgccggatcgggccgggacgggcactctgccaccggcccggggtgttgcgtcacgccgcgcgtgctgaacctctttgcctatacgggcggggcgagtctcgcggcatgtgccgcaggggcggatacgacgcatgtcgattcggtgaagcaggtggtcacctgggcgcgcgagaacatggagctgagcggactggacggcatccggtggatcgtcgaggatgcgctgaaattcgtgcagcgcgaagtccgccgcggcaaccgttaccacggcatcgtcctcgatcccccggcctacgggcggggtgccaacggcgagaaatggattctcgaggacaacatctgcgagatgctcgagtgctgtgcccggttgctggagccgcagggagcgttcctcgtgctgaacctctactcgatggggctttcgtccacgctggcccgtacggccgtgcggcaggcgttcggtgcaccgcgtacggagcagtacggcgaactatgttttaccgaccgggcgggcaagcagctgccgctcggtacgtactaccgttttacacgttaaaaacttggaaccatgagtattctgatcgtattgttcggcctgctgagcggctgcctgttgtccgtcctggtgggcatcatcggcagcagccggcgcatcggcttcgggctggcattcctcgtgagcctgatcttcacgccgctcgtggggcttatcatcaccctgctgaccgacccgttgccgtacggcggccagcgctggggctgcgtcggcacgttcgtggccatcctcggcctgttgttcctctgcgccttcctgatcctgttactggccggaggcgccgtcgtcgccatgttctgatttcccgtaacgcccctccagcaggaggatcatgttttcgagtttctcctcgtgctctccgaaaaaccagtcgtcgaaggccctggggatcaccccgatccagtttcgtaccgttttgtcggcgagcgttttctcgaatccttcgcggtaggatgaattccaatggagattctccatttgggagggtagcatggcctgcatgcgctggtcgtagtacagctgcatgtagtcgtcgaacgccgcgagttccttatagcagcgcagcaggtcgatgagggtctgcttgtcggcgatatgggaggcgatgcccgtcgtcttgagcatttccaacgcatcgctcgacaggcggtagggcttgcccatgccgccggtgatgtagcgcgaataggtttcgaccgtgtcggacgggaatcctgcgagcgaaaaatccgcttccagcaggcgccgtgccacccatttgtctttgctgtaagtgtacttgtaatcccggacgacctgcaggttgtcgtgcagttcggatgcgacgagctgcatggcctgccgtacctcccgctgtttcgcagcttcggtgatccgggcggtcagccacagggtcagcagtacgccgcccgtgacgatcgagaactggcgcgcgtagtcgccgattttccactttttgatccgttttttgaggggtttcttcatgggtgcggggttgttttccttccggggatgctcagaatacgtagtatatcaggatgcctgccgcggccgagaggcagatcagcaggatggggttcacttttttgaccgaggcgacgaagacgccgccgaacagcgcccagctccagccgtcgatgaagttctgttcgtcgggcgctttgctgtgcgggaacatcagcagcagtgcggccgaggcgatcatgccgatcaccacgggccgcatccccttcatggcgccttcgacgatggggttttgcttcaggcgaaggaagaagcgcgtgatgagcagcatcagcgtgagcgacggcaggcatacggcaaacgtcgccagcgccgcccccaggatgccgcaccacgcgttgccggcctgcgccccgaccgtatagcccacataggtggccgagttgatggcgatgggcccgggcgtgatctgcgagacggccacgatgtcggcgaattcggcattggtcatccaggcgtgctgcacgaccacttcgttctggatgagcgagagcatggcgtagccgcctccgaagccgaagaaccctattttcaggtagcttacgaacagttgccagaagatcatttgcctgcttttttagcgatgaataatgtccatgcgatgccgatggcggccgctgcgatcaggatatagatcggcgaccagcccaggtaccatacggccagcgccgacgcggcgatcaccgcgaatagggcccagtgcatcccccgcgccagcgagatcaccggcacgacgatcagtgccaccacggccgggcgcatgcctttgaatgcggcgtccacaacggggttgtggcggatgtcggcaaacaggagcgcgatcgcgaggatgatgacgaacgacggcaggacgctgcccagcagcgccgccacggcacctttcagcccccgcatcttgtagcctacgaacaccgaggtgttgatggcgatggggcccgggacggattgtgcgagggtcagcaggtcgaggaactccttgtgctcgatccagccgcgcttggcgatcagctcctgctcgatgagcggcagcatggcgtatcccccgccgaaggtgaaaagcccgatcttgaagaaggaggcgaaaatggtacgaagtcgttgcatgttttccgtgttctttacttaatccggcgtgtgcggcggccctgtcgcagggacggggttccgggggcggctatgctccctgcccggccgttttattgtccggcgttggccaccgacgccatgaccgtggcgacgacggctgcggtttcggtgcgcaggcgctgcgtgccgagggtgatctcctcgaatccgttggcatgcgcgaaagcgatctctgcgtccgagaaatcgccttcggggccgatgaagaccagcgccgactcgcctttgcggagcgtcgcgggcaggtagattttgcctgcgggcgacagcgccggggcacagtgggcgatgaatttccgcccctcgaacggcctggctgcggcctcgcggaacggcgtaagcgggtgcagctccgggcggtaggccttgagcgactgtttcatcgccgccgtgatgaccttccccgcgcgttcgggtttgaagacgcggcgttcgctgtgttccgtttcgagcgggacgatggcgctgacccccacctcggtggccttttcgaggaaccattcgaagcggtcggcgtttttggtcggcgccacggccatcaccagccggtaggggagcggttcccactgcgcctgtgtcgtggtgacgcgaaccgtacatcgtttcgggttgtcgtcggtgatctggcaacaaaataaattgccccttccgtcagttatatggagggtatcgccgcgccccagacgcagcacgcggacacaatgtttcgactcctcttcgctcagcgtatagaggggcggcgtgatgtcgggggcgtaaaaaagttgcatacctgttataaattactaactttgcatcactatgcggacgcatcgaaggtgcttccgccgtcggcgattgcaaagttacacaaaataacacgatagatgaaacgtattgcaggattattcaccacacttttgctgcttatgacacttgcgtcatgcgattcccggaaaacagccggggaaaacccgtttttcacccaatgggatacgccgcacggcgtgccgccgttcgacaagatcctgcccgagcatttcatgcccgccttcgaacgcggcatgtcgttgcacgaggccgaaatcgacgccatcacctcgaacaaggacgaggcctcgttcgaaaatacgatccttgcctatgacaatgccgggcagatgctcgcgcaggccgaactggtgttcggcatgctgtgtgccgccgagaccaacgaccgcatgcaggccctccaggaacaggcgatgcccctgctggccgcgcacagggacaagatacgtctcgacgacaagctctttgcccgcgtgaaggaggtttacgaccggcgtgcggcgctggggctcgacaccgagcagatgcgtctgttgcagaagacctacgactccttcgtgcgcgccggggcgttgctcggcaccgagcagaaggcccgcctgaaagagatcaacgggcagctgtcgctcacggccgtgaaattcgggaacaacatcctcgccgaaaacaacaatttcgtgctcgaactcaagtcggacgaactcgacgggctgccggcaggcatccgcgacgccgcccgcgagaaggccaggcagatgggcaagggcgacaagtgggtcttcacgctccacaagcccagcctgatcccgctgctgacctattccaccaggcgcgacctgcgcgagaagatctataaggcttatctgaaccgttgcaataacggcgacgaatacgacaacaagcagctcatcaacgatttcatccgcctgcgtacggagaaggctcacctgctgggctatccttcctacgccgcctatgtcgtggcggacgagatggccgggacgaccgatgccgtttacggcctgctcgaccagatctgggagccggcgctcgagcgcgccaagggcgagctgtccgagatggacacgctgttgcagaaagacatccccggtgcgaccttcgaatcgtgggactggtggtattacgccgagaagctgcgcaagcagaactatgccctcgacgaggagatgctgcgtccctacttctcgctcgagaacgtgcagggcggcatcttctacctggccaaccgcctctacggcatcaccttccagccggtcgtcgtgccgttataccatcccgatgcagtcgcctaccaggtgctcgacgccgacggctcgcacctgggcgtgctctatttcgactatttcccccgcgacggcaagagccagggcgcctggtgcggcaactatgtcgagcagacctataaggacggcaagcgcgtggctcccgtggtgagcgttgtctgcaacttcacgcgcccggtgggcaatacgcccgcgctgctgacgctcgacgagacggaaacgctcttccacgaattcggccatgcgctccatttcctgttccacgacgtgaaataccgcggcctttcggaggtcgagggcgatttcgtcgaactgccttcgcaggtcatggagaactgggcgttcgaacccgagatgctgaagcattatgccgtgcattaccgcacgggcgaagtgatcccgaaatacctggtcgacaaactccgcaagagcgaactcttcaaccagggtttcgccaccacggaactgatcgccgcgtcgctttccgacatggatatccattcggtcaccgaatacgaaccgttcgacccgatggcattcgagcggcaggcgctcaacgagaaacgcggcctgatcccgcagatcgagccccgttaccgttacccctatttcagccatatcttcgacggcggctactcggcaggctactatttctatacctgggccgaggtgctcgacaaggatacgttcgaagccttccgcgagagcggcgacctgttcaacaagaagatcgccgccgatttccgcgccaagctgctttcgcgcggcggttcggaggacggcatgtcgctctaccgggcattccgcggcgccgatcccgacaagcgggcgatgttgcgcagccgcggactctgggacgaacccgagccggaacccgccgacgaaggcgaagcgctccttcagccggaaatacggcaggaatagcccccatccttaaaattaacccaatatttgcaataacatgaaaaaagcatttatcatcatgaccttttctgcgatggcggccgggtgtgccgacaattcgatccccaaggcgcagatgcccgaattagatacttcgaaccccttgctggccgagtgggatacgccccaccagaccccgccgttctccgagatcgaactctcggactacgagcctgcgttcgacgcggccatcgcctgctcgcgtgccgagatcgacgcgatcgtcggcaacccctcgaagccgaccttcggcaataccatcgtggccctggagcgccacggtgcgctgctggatcgtatttcgggtatttttttcaacctgctcgaagcggacacgtccgacgaaatgcaggaaatcgcactgcgcgtgcagcccaagctgaccgaactgtcgaacgacatctcgctcaaccccgagctcttcgcccgcgtgaaggccgtctacgggaaacccggccgcggcctctcgaaagaggacaagaagctgctcgaggatacctatcagagtttcgcacgcaacggggccgccctgtccgacgcggacaaggagctctaccgcaagtattcgtccgagctgtcggccgcgacgctccaattcggccagaacgccctggctgcgaccaatgccttctcgatcaacatcaccgacccgaaggtcgtggccgaactgccggacttcgtgaaggagggtatggcagccgatgccaaggcgcgcggtgaaaagggctggacggtgacgttgcaggcaccgagctatgtgcctttcctgacctattcgtcgaaccgtgcgctcaaggagaaactctggcgtgcctacaattcgcgcgcattgggcggcgagaacgacaatacgccggtcgtcaaacagattgccaacctgcgcctgaagatcgccaacctgctgggctataaatgctatgccgactacgtgctcgaacgccgcatggccgagaacaccccgacggtcatggccttcctcgacgagctgctctcccagaccaaggcctatgccgaccaggactataagaccgtcgccgactatgccgcttcgctcgggttcaaaggccagctcatgccgtgggactggggctattacaacgagaagtacaagcacgagaaatacgcgctcaacgacgagctggtgaaaccttatttcaaactcgaaaacgtccgcaagggcgtcttcatgctcgccaacaagctctacgggctgaacttcacgcccaacgacaagatcgaggtgtaccatcccgacgtgacggcctacgacgtgaccgaccaggacggccgtttcatggcggtactctacctcgatttcttcccccgcgaatcgaagcgttccggggcatggatgaccgagttccggggcacgaagatcgtcgacggcaaggagacccgtccgctggtgtcgctggtgatgaacttcaccaagcctaccgaaacggccccttcgctgctgaccttcgacgaggtggaaaccttcctccatgagttcggccactcgctccacggtatgctgggcgagggcaagtacgagtcgcagaccggaacgaacgtttaccgcgacttcgtggagctgccttcgcagatcatggagaactgggctactgagaaggagttcctcgacctgtgggccgtgcattaccagacgggcgagccgatcccggccgaggtggtcgaccgcatcgtcgccgcgcagaactacctggcggcctattccaacgtgcgccagctttcgttcggcatgaccgatatggcatggcatacgatcaccgagcctttcgagggcgacgtcgagcagttcgaggtcgcgtcgatggctccgacgcaggtgctgcccgtcgttcccggtacggccatggccccggcattcggacatatcttctcgggcggctatgctgcggggtattacggctacaagtgggccgaggtgctggaggcggatgccttctcgctcttcaaggagaagggcatcttcaaccgcgaggtctccggctcgttccgtgagaatatcctttcgaagggcggtaccgagcatccgatggaactctacgtgcgcttccgcggccacaaacccgaaaccagggcgctgatcgagaaaatggggctcggcaaataaccgtattcccatacccgataaaaaaagggaacctccggccggaggttcccttttatggtgcatttcttttgcccggaaatgttcctaatgatgaatattttgctaaatttgcggttgggattgagaattttattacgctaatacacacttgcactatgcctctggaaaaacttaatgcggcactgatcggtgctatacaaaatagtaccccggaatacaccaatgcggcgaccgttctgacagacaagctcaatatcggccgcgaggcggcttaccgccggctgcgcggcgaagtgcctttcaccttcggggaggcgggcgtactttcggcgcagatgaatttttcgctcgaccgtacggtcggggccgtggatttcggaaatgtgcttttccggttgagtttcagcgattaccatacggcgctcgaagattatacgggggttatagaccaggatacccttttttaccgcgaggtttcgtccgacgacgatgccgaacaggccatcgccggaaattcgtttccgcggatgctttatatgcgctatctgaacctgaccaatttcaggcttttcaaatggctctaccagcaggggctcatcgactgctcgggggccaagttcgaagacctgtaagcaccggaggtgcttttgcagagttaccgcgacctggtgcacgaagcgcagcaaatgccctccacgaccctggtattcgacggaagctgtaccaaacgctgggtcaacgccatctgcgcgttccgcaacatgcacctgatcacggacgaaagcgtcgaggtgctgaaagccgagttgctgcagatgctcgacgaactggaagagatttgtgtctccgggcagttccgcagcgggcagccggtgtcggtctatatttcggatatggatatcgaagcgacttattgctacctttcggcacggcattaccgagggagctgcatcgaggcgttctcgatcaactcgctgcgcagctccgatccggacatgttcgagcacaccaaacgctgggtgctggccctgagccggtttgcgacgttgatatcatgcagcggggaattgcagcggatccatttcttcaagcggcagcgtgctatcgtggcagaattggaaagggagggcttagaaccctcccccgaagtcttccaggaataaacggaaccttgcgtctagctccttggtgtctatcctgtgcttcaaatcctgacggattttccacttgcgtcacttttgcgggtgtaacccgccccttgcacaatcccacttgaattcttcatatctcctgtgcaatacaaaagtagggtaaggcgccgggtaaaacaagacggaaaacgggtatcggtgcatattgattgtctgattttgatacctgtttttcagtacggctcggattttgaaaatgaattttcaggtgtggatggtattgctgaaacccgaataagcccggtttatttgtttcgtaattcgaaacaagctgttcgagggacaagcgtggggaagaatgaaaaaagcgaggaaacttcctcgctttttcagttgagctacctggattcgaaccaagaataacaggaccagaatctgttgtgttaccattacaccatagctcaatgacgttttggtgatgcaaaagtagaactttatttttcaattgcaaagaaaattcacaaaaaaaattagtacatttgttttaatcattttccgaccgaatgaacttgtaaataaaaacaacctaaaatcagagaattatgggaattaaattccgccttatcgtcatgaacttcctccagtatgccatctggggttcgtggctcatctcgctgggcgcctaccttggcggtggcctcgacttcacagggctgcaaatcggaagtttctttgccacgatgggtgttgcgtcgttgttcatgcccgcagtgatgggtatcattgccgaccgatggatcccggcgcagaagctgctcggcatctgccatctggtgagcggcgggttcctgattgccgcagcttcgcaaacggcctatgcgcctttatacagttgtatgctgctgagcgtgatgttctacatgccgaccatcgccctgtcgaattcggtggcatacaatgccctcgacctggcaaggctcgataccgtgaaacattttcctccgatccgcgtgtggggtaccgtaggcttcatcgccgcgatgtggttcgtcgacctgacgcatatcggcggcgtgcagatcaagctgaccgagtggcagctctatgtttcggcggtgctgtcgttcctgctggccgtctattcgttctcgctgcccggctgccccgtcgaccgcaatgtcaaggccaggtcgtgggtcgatacgctggggctgcgtgcgttcacgctcttcaaggagaagcgcatggccattttcttcgtcttctcgatgttgctcggcgccgcgttgcagataaccaacgccttcggggactcctatatacaaagcttcggctcgatgccccagtatgccgattcggcgatcgtgaagcattcggtgatcctgctctcgctgtcgcagatgtccgagacgttctgcatcctgctgatcccgttcttcctgcggcgtttcggtatcaagaaagtgatgctcatttcgatgctggcgtgggtgctccgcttcgggttcttcggcgtcggcaacccgggctcgggtgccgcgttcctcatcctttcgatggtcgtctacggggtggcattcgatttcttcaatatctcgggttcgctgtttgtcgagaaggagaccagccgcgagatccgctcctcggcacagggtgtctttatgattatgaccaacggcttcggtgcgttcttcggttcgtatgccgccggtgccgtcgtcgatgcctggggctggcccgattcgtggtatatcttcgccggctatgccctcgtggtggccgtggtcttcgcgttcgtgttcaaatacaagcacaaccccgaagagatggtctcggtgaaccattaatataggtatggttccggcggcgtggggaaacctctcgccgccggaatttttttgtccgtttccgggctacgggcggagcattttgacgtgcgggatacccgcttcgaaataggtgcccgagaccggtgcgaaccctaaggtggcgtaaaatccggccaggtgctcctgagccgagatgcggatgggctgcgggccccatgtccgggcaatatagcgcagcgcttcggacatcaggctgcggcacagtccgcggcggcggtacgaagcatcgaccagcacgcggccgaccgaggcttcgtcgtaggcgatccccgccgggatgacccgcaggaaggcgactacgcgggcgttgtcctccatccacatgaatacgctctgcgggtcggcggcgtcggcatcgggttccgtgatgtgctgttcgaggaagaagacggcctcgcgtgcctgcacgatacggtggtattcccggacggagagttcgctgaaatgtttagtgatgacaggatacatggcggtttgtaattgaacacaaaggtacttaaaatttcggaagatatggatacgatccgtgtggatggtgcgagctgcatccgttgcggccgctgtgtgaaggtgtgcccttcgcagattttcgtacaggagaaggcgggcggccccgtggcgctctcgaaacccgggaactgcatcgtctgcgggcactgtgtcgcggcctgcccgacgggggcggtgctgcatgcggaattcccgtccgggagggtacacccggtcgattatgcggccatgcccacacccgctcaggtcgaactgctgatggccgcgaggcgctcgaaccgggcgctgtcgcagcgtcccgtgccgcaggagatgctcgaccggatcgtcgcggccgccgacctcgctcccacggccaccaacgcccggcagttgggctatacgctcgtgaccgaccctgtgctgctgcgccgtatgagcgaatatacgctcggcgtgttcggcaagctcgcggatcgcctttcccacccgctcgtgcgcccgtggctgagccgtttgttgcccgacgtctaccgctatatccccgttttccggaaaatgcgccgcgaatatgccgagggcaacgaccgtatcctgcggggtgcgacggccgtgttgctgatccatgcgccgaaagagagccggttcggcgccgaagatgccaacctcgcctaccagaacgcttcgctgatggccgaagcgctcggggtgagccagatatatatgggcttcgtgctgaccgccgtgcggcaggataagaaaaaggggctctgcaagatgctggggctcgccggtcgccgtatctgtgccgtcatggcgctcgggatgccgcagttccgctacccgaattatatcgaccgcacgccttcccctttggaacggagataggcttgcagggcttcccggagccgtgcccgggaaatttcagtcgcttttttcgggggctttgtttcttcgcttcatctgtccgcttgatccggctgttgtctatggaaccgcggcctctcgctcctttgtctttcccgggggcttttgccgcggttgctccgcctggctgtcttatccggttgcttccagtggaaacctctcttctgccctcttgctgcagaattgtccgtccccgcctctgcccctccactcgaatgcggccggatagcgccggttgtcgccgggatacaaaaaaaagcggcccctgcacagcagaggccgcttctcctttgcggctcggtgtcagttgcccgaaaggccccactcccccggggagtagccgcttttcggagcgttcggcacgttgacgaagaattcgaacccgcatttggcttcgatctccgccacggataccgcacaaccgtccggtgtctgggccttgtctgtggtttgctcgtaccagaatccgatgcattgcagttcgtcggccgcaagcgtggttacgggttgtcccgtggtgccctgcttggtgcgcagcaataccttgtaataatgcgtcggtacggggcacgggttgccgccgttgtcggtcgtcgtaccctctgtcccgtcaaaataacatcccgttaccacatagagcgtatcggcgcacatccatccgcggactctgttttccagggtgccccatgcaccgctgttgaatgtagcgagctgtggcgtcatgttcgaatagtaggaaatctgcttgttcgccaggttgctcactttccggtcggcgttggggacttggtgtcccttgttgtaaggtgctcccacgccgcccaccatctgctcggtctttcccagcgacgggtcggccgagtaggccctctctttcgaagcgttcggggctgtataataggcgtgcagcggatatgctgcccatagggccgcctttttcgccttgtcataacccattgcgaaattgcgcgggtaggaaccgttgcccgtcgccgccacgtcggtgatgtagtggcatatctcggtcaccgaagtgttcgctgcgggcagttccgcccacgattttcctaatgccgctgttcctgttcccggagtagggtctggggaaggatcgcctccttccccgcccggagttcaattcgccggttgccaggttatgtcgcctatcgtcgttctgttctgattattttgttttatggtaatagtggcgtcataaccttgacagtcgattgtcggtatttcgaatgcgcttttactgtttcccggaatagtgatacttgctgccgtggcaccattggctgttatggtgactgttgccgaacccttgcttgaggtcaatgcattgaatttaagggctgtaatacctcctgggatcgttacggacatcgagccgtttttaccgatggctgcatatttgtcgtttattaccacgactccggcattggcaagcgccgttttgtcagtgttggcctgattaggattaccacagccattatagctccattgcggggttccagtggttactccattgaatgtgccgctggaaccataactggtagtgctgggcacggtgtaattttcgaaagtctcggtttcccacattacagcccccggttttgtctgggtgacgcttacggtttgcgcttcggcgccttcgtacgataatgtgatggtgccggaacgttcctcgccctgatttgcgtctatcgtgaaagaaacgccgtcgacgtcataaacgaatgaattgagccaggaaacgttcgatgatgcgacgaccgacaccccgtctgtgggattatcaaccgtatagttgatggttttggtagcgctttccgcaggaacggacaaggtcgtttccgatgtgattttcagtaccggaggcagggtgatgtcatggccgggagcgatctgtatgctttcgataattattctttcttttgcggcggagggctcgatcctgattttcgttttcgaattttgtgcgtcgaatttcagcaggtaggttttgaactcctcggtcaggtctgcggtcgtgattgccgcggattctccggcggttactttgattccggaagtatctttcggccagactttggccgaaatcagtactgagaacggtgcggagagatccagttcgctggtgacgatatacccggagttgtcgctcgaactcatgcgtaggccatgcggggagttgtattgataaacataggagttcgccacatacaagttgtttccgtttttgtctttgcgggacaggatatttgttgcggagtttcctgtcaggtcactgaaatcgtcggtaaacggcaggctcagaccggttgccgcggctgtgatgtgttcgtctgaaagattgacattcaaagtggtgatctttcctgtttccagatcgatttcattggacaggacaatctcttttttgatgacatacccttctgtcgctgcttcgacgaccaatttcgaccccgcagccagcaatcgcggatatacgcttaaataggtgccgctgacaccgttgataacgtattccgtatttgtcgtataggtcgccgttacggtgttggagccgttataatagggtgcatacatcgtgtagttcaagaggtctacaacaacccggcctgccagtgtgttgtcgccatcggtcgtaatggacaatgacgatacgtgctggtcggccagttttgcgcctgtggattggtctttgagtacgactttgacgatggcgctcaatcgtctgaattccagattggcgacttgctgtccctcggaatcgagtgtaagcggtttgctgaccaggatgtcggctttgccgtcgaacgaactggctgtcggggtttggtttgccgggagatcgacttttgcacccgtattatctcctactttgtcgattccgttggccgtgaatggataataagcgtaaatcgttgatgaaatgttcgcgttcccggaaaaagtcgttgttgcggcgcgctccgtcgcatcgtttgtgaaggggtagttggacttcgtcccgtcggtactgatgcctatctgatcgccgacagaccaataaggagtcaatccgtcgatctcggtgcggacttccggtttgaactcagggtttccggccgtaaaagtcatcttgacgagtttgccggaaggggtgtcgatgctgctgtcttccttttggcaggctgtagctgttacagcggtgagagctgcaaacagtgtgattttagagagacttttcatagggctgcggtattagagttcgtgttcgcttcccgatccgatacctcctgcaccgccgccgctgccccaatcgtcatagacgtcgggtggggtgggcgatgttgcaaaccctttttcagtctcgatgtcgatcgtctcaattacgggcggaagataggtcgaatttccccccccccttgctggtggacagattgtaattcataaggctaaatttttttggttgaaacattttcgtatcaaatatagcaaaaaaatagtctattcccgttaaaaaattgtgaaattccggttcccggtcaaaatatatacacaaacgtctgttttcctgccgggttttgtctgtttggcgtattgttgccggtgccgacggcgggaaacgacgaccgtgccgcattgccgcagccggtagccggattgtctgggatgaaagggtgggtggatgagccggggatcgggatttagtacatattgtcgtacatcgactggctcttgtcgtatttgaggtctgaaagcgatgccgcctttacgccgatgttgaagctccagctgcggtggaacccgaagggtatccacgagaacgacatctgccagcagtgcaggtcgcgcgagatggagatcgacgaggtggtgagtttgttcgccttgatgtcgtaaccgccctggaacgtgatgccggtcttgggcgttatggtaaggctgccgttgaagctgacggtctgcgtgacgttcttcttgtatcctttgggcgggtaattgcccgtcgatatgttgtagttgatggcatagttgaacccgaagttccacggcagcgagaaatcgtagtacatctgcgacatgtattgccgccgcagtacgggatccatgttgccgtaggggtcgtagtaggggttcatgtattcgggcgggatgctggtgatgtcgttgatggccgattgcgagcggtcttcgcgcgatttgaacgtatagccgaacgaccagcccgtcgagacgatacgccccgggaagaagagcttgttgtagcgtttgccgtcgggggtcagccggtaggggtcgagcgtcatcgagaggttgatgccgaaattcttgaagatcgtcgtgcggaacgagatcgggatggtcgagagccccatcgagtcggccaggaaattgtacgacccgctgatgcgcagctcgtcgatcagcttgatcttcttcacgcccgaggtgtcgcgcttcgacagtaccttcatttcgaggttctgcgacagcgagaagttcatcgacatcgaccgtccggaactggggacgccgtatgcgttgaccgaatagggcgaataggtggtgaaacgtcctgtcgagtcggtctgccgcgtcttgtagtagccgtatttcgggtcgccgaagtccggcgtataggcgaatccgatcgaaggggtgagtgtgtggcggatggcctggatcttacgatccttgcgcttcttggtgaagtcgtacatgccgtatacggtcgtcgatgccgagacgttgaagttgtagttgtagaggcggtagaacccgtattgcgtcggcagcgtgtccaccttgttcgtgacggggttccagtcgaattcgacttttttgaaataccacttctcgttgtaggtcgccgacggcgagatgttgatgtagttgaacaggttgaacgacgccgatatggggatgttgtgctcgataccgttcttcatgttgtcgagcgtctccttcgagaagatcttgtcctcggtggtcgtcaccgagttggtcatcttgcccgtatactgcatcgagatcttttcgtaccaccgctctttgcccatgcgctccttgcgcttgaaggggtagaaacgcgagacgttgaaaaccacggtcggcagcgttaccgagaggcttttgttctgcgagttctgcgagatggacatgttcgccgagagcgagaagggggttcccgcccagttcttcgagtaggcgatcgacgagttggtctgcgtcgagaggatgtcgttgaggttggtcgccgaatatttgctgtaaccgctcgtggcgaagttcaccgatgccgagaaggtcgacccggggttggccttgggatcctgggagtgcgtccactggatgcggaagttgctctgcttgatatagtccggctcgcctttttcgcccgtcttgatgttcgagtactgcatgttgaaactgccgctgtacttgtagcgtttgatatagcgcgatgcggccgacgcctcccacgaaccgagcgtgtagataccgccgcgtacggccaggtcggcatagtcgcccagcgtgaaatagtaacccatgtcgcgcaggaaaaaccccttggagtattcctcgccgtaggtgggcatcagcagacccgatttgggacccatgttgatcgggaagaagccctcggggatgccgaggaagtagatcggcacgtcctccatgaccaggtaggccggccccgtgacgactttcttgccggggatgaccttggccttggtcatcgccaggtagaagtgcgggtggtcggtctcgtcgcaggtcgtgtatttgccgtgctggatgttgaccgtgttgtcgggcattttcttcacgctgcctccgaccagccagccgtcgccctgctgcgtcgccacgcccttgatcttggccttcttcgaggtgaggttgtaggtgatcgtatccatcgtgtacgatgcgtcgccctcggagaattcgggtttggtgacgatcggtttgccttcgagcgagtcgggcttgccgtatgcatagaccatcttggtgtccatgttgatctgcatgtagtcggccttgaggttgctgttctgataggtgatgtcgccttcgttgtaaatgtagaccatcttgttgcgcacgtcgtagaccagcgagtccttgttcttgcccgtgatcgggtcgtcgaggaacgcccccggtttctggggctttttctctttcaccgtgtcgcgggcgatggtgtccgccccgcggccttcgagcgagtcgcctttctgcgtgatgagcgaatcgagctgtgcgccgaagagcgaatcgcgctgctcctgcggcagggcttcgaatgcggcgcggcggcgtgcctgttcccgggcggcgcgtgcctgctcgcggcggtcgcggcggctttgggtcgcagcttccggcacttcggccgcggcttcggaatgggtctggagggaatcggacaggcgttggcggaggctgtcttcggctgccgaggcaagcattccccggggtacggacgagccgaacaccaactgggcgaagagtaggagtgccgccgccgaaaacagatattttaccctgattctatccaaaatcccaataatttttcgtacctttgccgacatgtcggcaaaaacgcctggatcggggcctcgatgcactcccgccgggttttttaggcgcgacaaagataggtaaaaaattacagaaagctcacatttggctccattaaatatgcgcacacgactgttcctgttattcgcgtttgcggccgttaccgttctaatgaacggtgccacggccgggaatattgcgcacggggtcgaagttgtggtcatcgatgccggacacggcgggaaattccccggggcgcactacggcaatgtctacgagaaagacctcacgctgaaggtggcgctcaaactcgggaagctcatcgaggaggggatgccgggcgtgaaggtggtctatacccgcaagacggacaaggcgctgggcaccgacttggcaaccgacctccaggcgcgtgccgacatcgccaacaaggccggcggcgacctcttcgtttcgatccacgtcaatgctgcgaaatcctcggcggcacggggtgtcgagacgctcatcatgggcgaaagccccaaggagcagcgttacaacgagaacgccctgttcgagaacaaccgcgaagacctgatcgacatgtcggacgagcggacggcggccatcgtgcgggcatatatccagaacctgcaattcacctacggcgagtacagcatggcgctggcgcgctgtatccagaataattacctgaaggccgggcgccattcgcggggcatcaaaccccagctgctgcgtgtgctctatgccaccgacatgccgggcgtgctgaccgagatcggtttcatgtccaacgcccaggagatggcctatatgaagtcggaaaaggggcaggacgagatcgcccgctcgatttacgagggcgtgaaggactattcggcctatgtgctcgaaacgcgcagagccggggaggaggccgcggcctctccgaagcccgttaaagagcccgaaacgcaggtcgtcatcgggaaggagcccgtgcgccctgcggagcaggacaaggcatccgatacgcctgccgggaagtccggacggaagcctgccgggaaggccgccaccccggaaaaggcggagccgcagaaggctgcgggcaaatccggggcgcaaaagccggaaccgcagaaaccggccggggccgaagctgcccctaaccaagctgcccggccgttgcgctataccgtgcaggtgctggccagcgcgcagaccgtgccgacctcgtccgcacgtttcaaatcctaccgcaacaaggtgaaacagtataccgccgaggggcggttccgctataaatattgcgtcggcgagtacgacacccgtgccgcagcccagaaacggctggccgaagtacgcaaggttttccccgatgccttcgtcgtgagctgccggggcacgcagattgtgaaatgaaaataaacgagctatgaaaagggaagttaagatcggcatattcgccgtggcgatgatcggcgtcgcctgggccggaatccggtttctgaaaggtttcgacattttcagccggaacgtcgagtattatgcggcctacgaccagatcaacggcgtgcagaacgcgtcgccgatcatgatgaagggcgtgaagatcggttccgtgacacggctttcgttcgatcccgcccgcagcgacaaggtcgtgttgcaattcacgatcaagcgccaataccgcattccgtccgattccgaggccaaaatcttcagcaacggactgatgggcgccaaggcgatcgaaatcacctacggcacggccgacacctacctccagaagggcgatacgctgcgttcgagccgcgaccgcgatctgatggacatggccggctccgagctggatttcttcaagcagaaggtttcgcagctcaccaccgacctttcgcgcacgctcgaaaacctgaacggcctgatggaaaccaatgcggacaacatcgccgggacgctcggcaacctgaactccgtgacgggcgacatggccgagatactctcggcggagaaaaacagcctgaagagcgcactggacaacctttcgaaattctccgacatgctcggcgagaatgccgggcgcgtggacagcatcatcggcgacgtggatcgtttcacctcgcagctcaccgaggaacagtttgcccgcaagctttcgcaggccgtggagcatctcgacggtctcgtggcacgcatcgcgcagggcgaaggcacggtcggcaagctcatcagcgaccccgaactgtacgattcgctcgaaaaggccagcgacaacctcgcggcgctgctggccgatgtcaaacaataccccggccgttacgtccacctctcgctcttcgggcgcaaccccgaaaagatgaaggagcgtgccgacaggaaggccgccaaggctgctgccaaggctgagcgcgattcgctcaagcggctgcagtagcccatcaacccgacatagagatgatttatcctgcaaacttcgagcagaagatcggcttcgaccggcttcgggaacaggttgcagcgctttgcaccatgcgtgccgcccgcgggaagctcgccgaagagactttctcggcctcggcgcgcgagatcgggcggaggctggaacttgccgaccagatgcgcctgctgctcgacatggagcacgattatcccggcggggaatatcccgacgtcgaccatgtcgttgccaaactgcgtgtcgaggggacgttcctcgacgtgggggaggtggtgaccctgcaccgggcgctgagcctcgtcggcagcgtcgttgcgttcatcctcgcccgcgaagggcaatatccggcgctgtatgcccgcagccgcggcgtcgaggcattccccgggatcgtgcagcggatcgacgccatcgtcgatcgtttcggcaatatccgggacaatgcttcgccggccctgctggagatccggcgtgccatccgcgaacgcgaagggcaggccgccaagcggttgcaggcggtgctcgccgccgccaagggggccggtatcgtcgatgccgacgcccagatctcgatccgcgaagggaaggccgtgatcccggtcgccgcggccaacaaacgcaagttgcagggcttcatccacgacgaatcggccacggggcgtacgttctacgtcgaaccggtcgaggtcgtggagatcaacaacgagctgcgcgaactggaatatgccgagcggcgcgagatcgtccgcatcctctcggagttcaccgattcggtgcgccccgatgccgggctgatcgccgcgtcgggcgactacctggccgagatcgacatgctgcgtgccaagggacgctgggcatcgcagaacggctgcgtgaaaccgatcatctcggacgacgaccggctggtgctgaagaatgcccgccacccgctcctgcagcaaaccctgcgggcgcaggggcgcgaggtcgtaccgctcgacatgcagctcgaccgccgcaagcatatccttgtcatttcggggcccaatgcgggcggcaagtcggtctgcctcaagaccaccggcctcgtgcagtatatgttccagtgcgggtttcccgtcccggcatcggaggtttcggaactgcccgtgttccgttcgatcttcatcgacatcggcgacgagcagtcgatcgacgacgacctgtcgacctattcgtcgcacctgctcaacatgaagaacatgctctcgggggcttcgtcgtcggcgctggtgctgatcgacgagttcgggtcgggtaccgagccggtcatcggcggagccatcgccgaggccatcctcgaacgcctgctggccaaagggtgctacggcgtcatcacgacccactatgccaatatcaagtactatgcgtcgaataccgagggcatcgccaatggcgccatgatgttcgacgtgcagaatatccgcccgctgttccgcctcgaaatgggcaagccgggcagttcgttcgccgtggagatcgcccgcaagatcgggctcccggaggatattatccgcgcggcgggcgagaaggccggcagcgaccatatcaacatcgagaagcagctgcgtgagatcgcccgcgacaagcattactgggaacagaagcgcgaccgcatccgccagaccgaccgcaaggtcgaggagctggagcagacctatgccgggcagttgtcgaagatcagggccgagcggcaggagatactcaaaaaggccaagctggaggcgcagcagctgatcgccgatgccaaccggcagatcgagaatacgatcaggacgatccgcgaggcgcaggccgaaaaggagctgacgcgccttgcgcgccgcgaactggacgatttccgcgacgcggtggcgaaggccgacacggcggacaaggacgccgaggtcgcccgcgagatcgaacgtatcgagcgccgccgtcagcggcgtgaagaacgcaaggcgcagcggggcgaggcgcaggcggcgggggctgcccctgccgaggctccgaaaccgcgcgaggtggaggccgggtcgaaagtccgcatggccggacaggatatggtcggcgtggtgcagtcggtcaaggggcgcaaggcgcaggttgccttcggccagatactgactacggttgaccggaagatgctgaccgtggtctcgaacagcgagttccgcgaggcgacacgcccgcagacggcgcggacggtggtgtcggccgacatttcggcccgcaagctcagcttcaaagaccatatcgacgtgcggggcatgcgtgccgctgaggcgctggacgccgtgcaggatttcatcgacgacgccctgatggtgggcgtggggtcggtgtcgatcctccacggcaagggcacgggggctctcaaggaggagatacgccgctacctgcgcacggtgcccgaggtcgaaagcgcccgcgacgagcatgccgaccggggcggggcgggaattacgatcgtgacatttgacctttcgtgaggacggctgcctccggcgcttccgctcgcggcagccgcatactccgcgtatgttcctgccccgccggtttcgtgaagccccggatgccatccgcccggcgaaaaacggataagatacaggatgaactacaaactctcggaaatagccgccgttgtcggcgggaaatttacaggctgcgatgccgaagtgcggtcggtcgtcaccgacagccgctcgctgtcgtgcgaactgggctgctgcccgatgttcgtggccatgcgcggtgccaaccacgactcgcacggcttcgtcgcccagatgtcggcgcgcggcgtgcgtgcgttcctcgtcgaacgtgacgttgagtgccccgccggttgcggcttcgtgcgtgtggacaacgccatcgacgccctgcaacgccttgcggcgcactaccgtgcgcaattcaagggtacggtcgtcggcatcaccggttcgaacggcaagaccgtcatcaaggagtggatcgccgaagaactgcccgcggggatgaaatattaccgctcgccgaaaagctacaattcgcagctgggcgtgcccctctcggtgctgatgctcgaaggcgacgaggagctggcggtcttcgaggcgggcatttcgaagcccggcgagatggagcggctggaacgcatcatccgtcccgacgtggttgtttttacctcgatcggcgacgcgcatcaggagaatttcctcaatctcgagcagaagtgcgacgagaaaatggtgctggcccgcaatgcctcgaaaatcatctaccacagctattacgagccgctggggggcatggtcgcggcgcgtttcgccgaccgcaagcccctcgatgccgcgtcgttccccgaggtgccggagtcggtcatcggcaacgccgcatcgcgccgcaatgcccagatcgtcgaggcgttctgcgccgcgatgcactatcccgcgccgtcgttcgcctcggcgcccacggtgcccatgcgtctcgaggtgaaggagggcatcaacgattcgatcctgatcaacgacgcctataacctcgacctcaattcgctggcgctggcgctcgattacctgcacggcgtggcgctgaaccgccgccgtacgctcgtcctgtcggacatctcgcagagcgggctttccgacggcgagctctacggccgtgtcgcggggatggtcgcacgggcgggcgtcgacttcctgatcggcatcggcccgcgcctgaaacgccatgcaggtctgttcggctgcgacaaggagttttacgcctcgaccgacgagtgcatcgcgcgcatcgaccgcagggccgtggccgggcgtgccatcctgctgaaaggcgcccgcgatttccgcttcgagaaactggcgcacgccctcgcgcgccgcagccatacgacggtgctggaggtcgacctcgacgccatgacgcacaatctcaatttcttccgttcgaagctcagcttcggtacgaaactcgtggcgatggtcaaggccggctcgtacggtgccggcgatttcgaagtcgcgcaactgttgcagcaccagggcgtcgattacctggccgtggcgttcgccgacgaaggggtactgttgcgcgagcggggcatttcgatgcccgtcgtggtgctcaacgccgatgccgacagtttcgatcagatgatcgccaaccgcctcgaacccgagatatacagcctccattcgctcggcgccttcgccggggccgtggtgcatgcgggcgagagccgttacccgatccatatcaagctcgacacgggtatgcacaggctgggattcacggacgacgaagtcggggcgctgtgcagggcgctggcggaaaccccgcaggtcaaggtcgcctcggtcttctcgcacctcaactgtgccgacatgcccgaagaggatgcctatacccgggcgcagatcgccctgttcgaccgcatgagcgcccgcgtcgccgcctcgctgccctatccggtcatccgccatacggccaattcggccgccatcgaacgcttccccgaggcgcagttcgacatgtgccgcctcgggctggggctttacggcttcggctaccggcataacgggatgctgcgtcccgtctcgaccctccgcacgcgtatcgtgcaggtcaagcacctgtctgcgggcgaggccgtagggtatggacgggccgggaaactcacgcgcgaaactacgacggcgacgatccccatcggatatgccgacgggctcgaccgccacctgggctgcggccgctggtcggtgctggtggccgggagccccgtccccatcgtcggacgcatctgcatggacagctgcatggtcgacattacggggattcccggcgtgaaggaaggcgacgaagtcgtggtcttctcgcccgagccgggcaacgacctggaaacgatggcccgcgtactcgatacgattccctatgagatcatgacctcggtttcggggcgcgtaaaacggatttacctcaaagaataacgttatgaaatgctatgattgcggcggtgaaatcgcttccggaaccggaacgtgtccctcctgcggttgccccgccgggcgcgatgaggccgccgagtgcctcggggcgcggctgctgacggcacagctcgaatccgaatcggccctcgaccagttgggcaaggctcgcagcgccatgttcgccgcggcgttgctggcgctcgccagcggcgtggtcgaactggtcaacgcccagggaaacggggtgagactgatggtcggaatcgtgatgctcgtgctggcgggcggctatgtggctatcggctgcaatgtccgcaaatccccgctggtgctttcggttgcggggctggtcgtgagcgcattcttcctgagcggtgttttcggggtggtgatcgccggtgtcatggcgctgagcgtctggtttgcggtgctgtatacgaaggccgccggccgggagcgggaactccgggccaaactcgaaaaactgaaataagatgtacggaacgctctatctgatcccgtgtccgatttcggacgaaacggcaccgtgggacgtgctgcctgcggcgaaccgtgccgtgatggattcgctcgactatttcatcgtcgagaacacccgttcggcgcggcggttcctgtcgaaggccggcatcgcgcggccgatcgacacgctggagttccgcgagctgaacgaacataccgtcgccgggcgtgaggtcgaagagctggtgaaaccgctcgttgagggccgctcggcgggggttgtttccgaagcgggcgtgccgggcgtcgccgatcccggggcactggtcgtcgaggcgtgccaccgccacggtatccgcgtggtgccgctcgtcgggccgtcgtccgtcatcctggccgtcatggcttcggggctcaacgggcagtcgttcgccttcaacggctacctgcccgtcaagccgcccgaacgggtgcaggcgatccgtcgcttcgaacgccgtgcgcagtccgaacgccagtcgcagctcttcatcgaggcgccttaccgcaatgtgaagctgatggaacagctcctgcaaacccttgcccccgagacgcgcctgacgctggcgatggacattaccgctcccggcgaatatatccgtacgctccccgtgcgcgagtggcggtcggtgcggctgccggaaatgaacaggcgcccggcgatttttatcatcgggtaggcatggcccggcggttggtatacaatttgttcgaatataagacggaaaatctgaaaaacacgagatatgaaaaaggaaaaaacttataatgaggctgttgacggtgacgaaggattcgttcccggtgaaggttacccttcgtgcgacggcgaaccctgtgccaatgtgtcagacgattcgcaggacgggactgacacaatggcagacgctgccgaaggcggcgacaaggccggagcgggatcggatctgacggcggcgctggccgagtggcaggataaattcatccgcctgcaggccgaattcgataattaccgcaagcgtacgctcaaggagaagatggacttggtgcagaccggcggtcgtgacgtgctgctggcgatgctccccgtgcgcgacgacgtgcagcgtgccgtcgatgccatgcagaagagcgacgacatcgaggcgctgcgtgccggcgtgatgcttatttcacagaaatttaccgatacgctccgccagaaaggggtcaccgagatcgacgtcaagggcaaggagttcgacgccgacctctgcgaggcggtggctaaattcgctgccggagaggaaatgcagggcaaggtcgtcgacattgtccagacgggttatatgctgggtgataaggtgctgcgtttcgcaaaagttgttgtaggagaataatgtcatggcagaaaagagggattactacgaagtgctgggcgtccagaaaaacgctaacgctgacgaaataaagaaggcttaccgcaaggcggccatccagtaccaccccgataaaaacccgggtgacaaggaggccgaagagaaattcaaggaggcggccgaggcatacgatgtgctgtcgaaccccgacaaacgtgcccgttacgatcagttcggccatgccgggatgagcggcgccgcgggtggcggggcaggcggcttcggcggcttcagcggcggcggtttctcgatggaggatatcttctcgcagttcggcgatattttcggcggacatttcggtggcgggttccgctcgtcgtcgtcatcgggcggcgggcggcgcgtgaaccggggatcggatatccgcatcaaggtcaggctgaccctcgcagagatcgccaacggcgtcaccaagaaactcaagataaacaagaccatcgcctgcgataagtgcggcggtacgggggccaaggacagcaactcctactcgacctgttcgacctgcaacggtacgggttatgtgacgcgtgtggagaacaccttcttcggccgtatgcagacgcagggcgtctgccccacgtgcggcggtacgggcaaagtcatcaccgcaccctgcgacaagtgcaagggcgagggaaccctccgcggtcaggaggtcgtggagatccgaatcccggccggcgtgggcgaggggatggtgctcaccgtcacgggcaagggtaatgccgcccgtcacggaggcgtcaacggcgacctgcaggtcatgatcgaagaggagtccaatcccgagttggtgcgtgacggcaacgacctgatccacaacctcaatatcaccgttacgacagccctgctgggcggtacggtcgaggtgccgacggtcgatggccgtgccaagatcaagatcgccccgggaacgcatgccggcaaggtgctgcgcctgggcggcaaggggttgcccgacgtcaacggctatggccgcggcgacgaactggtcgtggtcgacatcacgatcccttcgaagcttagtgccgaggagaagcggctggtcgaacagctggcgcagcagcccggtttccagcatgccgaatcggtcaagaaccagaatatcttcgagcggatgaagagtttcttccggtagggaagcagcggtttgcatatgcggcgggatgtcgggggactttgcgggccacggcattccgccgtcgttcgcagcgcctcttccgctgcggtgcacggaggcttgcgggcgtattccccgccgcctttcccggggccattgcgcctgttaccagcctgtttgaggggtgtttcccctcccgcaccgctgccggggttttcccctgctgcggggcatcggacgtctggcaccgcatcctcggcaggactttacgggcgccgcaggcggaaaaaagggttttgcaggcaataaaattgccggagaattcgtatctttaccaaaaataattaggaggacacgccatgttaggtttcaccccgttcaagagacacgccaacaagttcaactacataccgcgctactacgatcccgaaaaggaggcgcgcgagcagcgccgtgccgaacttcgcggcgagagggtcgaagacggggatcgtgagtaccgtcccggacaatatatccgtacgcagcgcgatgcccgtgccgcccgccgttccaaggaggatgacaagggtcgtatgcgcatctggaagatggccggtgccgcagttatcgtcctgctgttcatctacatcctttatccgaagctcgccgatgtgttcctgcgcgcccgtacggcgccggcacagaccgaatccgctgccaccgaatccgctccgcgcaacgggctcgaccagacgggtatttccgacgtagagtggcaggagcagcctatcacggtggttcccaacgattatcaggaataaatggcagataagatcagattattacccgaagtcgtcgccaaccagattgctgcgggcgaggtcgtcaaccgtcccgcatcggtggtcaaggagatgatggagaacgccatcgacgccggcgcccgtaccgtgaaggtcaacttccgtgacgggggcaaggatttgatccagatcgtcgacgacggctcgggcatgtcgcccatcgacgcgcgtatggccttcgaccgccatgccaccagcaagataacttccgtcgaagacatctacgccctcaatacgttcgggttccgcggcgaggcgctcgcttcgatcgccgccgtggcgcaggtcgaactgcgcacgcggcaggagggcgacgaggtgggtacccagaccgaaatcaacggcggccagttcgccgggcagactcccgtgatgtgtcccgtgggggcgcagttcttcgtgcgcaaccttttttacaacgtgcccgcccgccgccgtttcctcgacaagagtacgacttcggccgcacagatcaaggccgaattccagcgtgttgcgctgtgcaacccccatatcgccttcgaactttacgccaacgacgctccggtctatacgctctgtgccacgtcgctggcgggacgtatcgttgacgtggtgggacgccatatcaagcagaacctgctggaggtcgatgccgacacctcgatcgcccgcatcgggggctatatcggccgtccggctgccgccaagcggcgcaacggcgagcagtacctcttcgtcaacggacgttatttcaagagttcgtacctcacgagcgccatcatgaaggcctatgagaaactgatccccgagagcagttcgccttcctatttcctctacctgacgatcgacccttcgcgcatcgacgtcaatgtccacccgcagaagaccgaagtgaaattcgccgacgaggaggccgtctggcagatcatcaacgccgccgtgcgcgagacgctcgccaagacgggggccgtgccgctgatggatttcgaccgcgacggcatcgtcgagatcccggcattgagcaaaggggccgtctacagcgagccccgcgccatgtccaacggcgactacaatccgttccgcgaggagtatatcgaccctacggcacccgatcccaatgtcgatttcacgggcttcgatgtcccgtacgacgatcgcggacagacgctttccgatacggccgggacgggcttcgccccgcgcgccggtatgggcggcggcaagtcgggggacagtgcgtccggtggcagcctgcccggcgggctgcgcagcgccggcagcggatttacccttccgcaaaccccgccggcgggggaggatttcaccatcccttcctcggcagccgacgggttcgaggatttcgtttcggggagcagtttcgaggtggagtccggcgccgggttcgggacgagtgccctggagttcatcccttccggggctacggccgggcagcagcggctggcggtcgaggggcgtccggaatttaccgatcccctgccgttgggcggcgggtacctcgccgcgctgctgggcgggaggttcgtcgtggtggacgtgcggcgtgcccgcgagcgcattctttatgaggattacctgaagatgctcggaaacgggtcttccgtgagccagcaactgctttttcccgagcggctggtgttgtcgggcgacgaatatgcgctgctcgaggagaacgccgtggaattcgcgtcgctgggattcgacatcgactttgcgggggaggggacgatcgaggtgaagggcactccggccgatatgccggccgatgccgtcgaccagatggtctacgacctgctgcaagccttttcgacgcccgtgtcgctcgcggatcagcgccgcgagaagatcgccgccgtcatggcgcgcggcggggcgaaaggcattccccgcaatatgtcgcgcgacgaagccgccgtactgctcgcccagctcgccgctacgggcaatttcagtttctcgccctcgggcaaagccataactgcagaaataacccccgaagatatccgtaccaaactgggataatccggtggaaaaacgtacttttgtaaaaattttacgcaatgaacagctattttcagacacccccggtggtgaaaaacctgataatcatcaatgccctggtctacatggctacggccctgatccaaccggcacataacgccatcatggagtattgcgccctgtggctgggagcgccgttgttccacacctaccagttcgtcacctacatgttcgtgcatgccaatttcgagcatatcttcttcaatatgttcgccttgtggatgttcgggcgtacgttggaatacgaattggggtcgaagcgtttcctgacctattacatggtttgcggcatcggtgcggcgctgatccagtatttcacggcgctggcgttcggcgagctgcccatgtcgctggtcggtgcttcgggcgcggtgatggggctgctgctcgccttcggcgtcatgcaccccaatgcggtcatcatgctgctgatcccgccgatcccgatgaaggccaaatggttcgtcatcatctacggcgtcatcgaacttttcctcggctggcgcggcgtaggcaatgtggcgcatttcgcccacgtgggcggtatgctttggggtttcctgctgctccactggtggaagcagcgcggcataatccgcttctgagccgatgtccggcgaattctataagaacgattacggcagccggcgcggggagaaaccgcaccgcagcctgctcatgtggctgctcgacctggtgatgacgctcctgaccgtcgttgtcggggccacgatggccgtcacctatttcgtcccttatgtgaaccccgccggggtctggttctttcccctgctggggcttgccgccccggcgatctacgtcgctacggtcatcctggcgctctactgggtcatccgctggcggctgctccgcgccgggacgatgctggcgctggtcgtcatcggtctcttcaaggtttcgctcttctataagcccgaattccgccgcagctacggcgaggagagctacgaccgccgggctttcaaggtcatgacctataacgtgcgcagtttcttcggcgaaagcggagccagcaatgtcgatgacatcgtgcgcctgatcggcgaatacgatcccgatatcgtctgcatgcaggagttcaatgcccgcctggccgagaaatccgacgatttcgccctgttggacgagaaatacgaaagcgcggccttcggccgtacgcaggctcccgattcgctgtacggggcatcgcttttcatcctgagcaaataccgtatcctgcgctcgggcatcgtgctgacccccaatacgtcggtctgggccgacctgctgatcggtgacgatacggtgcgcgtgttcaacaaccacctgcgttcgacggcgatcaaggcggccgacaacgaatatatcaccaaccgcgatttcatctccgacacggcacgcgaagtcaagatccgcagcatcgtgagccgcctgcgcgagaacagcatcctgcgtgccgcacaggtcgacagcattgccgatgtcatcgccgacgcgcgtgcgcggtgcatcgtctgcggcgatttcaacgatacgccgatgtcctatgtctaccgcacgatggccggggggctgaacgacgctttcagcaagagcggttcgggctattcgcatactttccgcggcttcttcaatacgctgcgcatcgactatgtcctctgctccgacagtttcgacccggtttcctacgaggtgcctctggtcgaatattcggatcacctgcccgtcgtggtgcgtctccaaaagaatctactgaataactaatccgataaactatgattttcgactctttgaagaacagcgcgctctattatccggtgagcccgcgtctggaaaaagccttcggcttcatcgcttcgaccgactgggaaacgatggagccggggatccatgaactcgacggcaaggacatctatgtcaacgtaatggaacctgcgctgaaaaaaccggcggatgccaaactcgaaatacacgacgcctatatcgacatccaggtgctgatccgcggcgagcaggagactttcgggtggagcgagcgtgccgacctgcgcaagccgctgggcgaattcgatgccgggaaggatatccagttcttcgacgatgagccgcagaccttctatacgctgcgcccggggcagttcacgatcctcttccccgaagacggccatgcgccgatgatcggcgagggcgatgtgcgcaagatcattgtcaaagtccgcaggtgattcgttgtccgggacagataacgggccggttcccatgcgtgggagccggcccgttccgttgtcaggcagccgcgagccgtggcggggcgaggcgaggcgcatcgcgaggcgtatgcagagccatgagcagacggcgcagacgacgaacacggtgcccgtcgagagaagtatgtcgccgatcccgaccagcggcgagacgatcccgccgaaggcgaagcatacggcgcccagcagtgccgacgccgtccccgcattctcccgggcactttccatcgccagtgccgtcgaagtcgtgaaggttagccccatggcgaacaggagcgcgaacatcagcaactcgtaaacccagaagttgcagcccgcggcgagggctatggcttcggccacggcgaagaagatcatccccgcacaaccggtgctggtgccgttttcggggcggcggaacctgaccgagagtgcggctgcgcccccgatggcgacggcgttgaccgcaaagcagatgctgaactggaaaggcgtgaacccgtagtgctgctgcacgataaagggcgacgaagcgatgttggcgaacaatatgccctgggcgaaccccaactggaagatatagcacaggtagcggcggttgcggagcgtcgttttgaacccgcggagtatatccgcccactccacggtgcttcggttggttgccgggagcgattcgctgaaacggaagctgcccgcgagcagcactatgcccagtcccagcaggatcgtgaagataccccgccagccgatgatgccggtgagtgttccgccgacgatcggtgccgccacgggggctatgccgttgatcgctccgatcagggcgagcatcttggccagttcgcggcctgagaatttgtccgtcgccaccgagcgggagatcacgatgcctcccgaccccgcgatgccctgcacgaagcgcagaaacacgaactgttcgatgtctgcggcgaagatgcagaacactgtcgagcccaggaacagccacatggccgtcagcagcggggtgcggcggccgtatttgtcgctcagcggcccgaagaagagctgtccgcaggccagcccgatcatgcttgtggtcagtcccagctgtaccatcgacgacgaggtgccgaaatcgtccgccatggcgggcagcgccggcaggtacatgtcggtgacgaagggcccgaatgcggtcagcagccccagcaggacgagcaggaatgttttggaattatctttatccatgtgcttttatggttttggcaccacaaaaatacaccgaattatcgggcggtgattggccttttcctgcagggtgtggttcattttcggcatgcggactgccgtcccgtctgccggtaaaagccccggagcggaagctccggggcttattgcggtgcagggcgcggcatcggccggatgccctgcggcgggttatttcccgccgcctatttcccgatcccgtagtagcgcagcccggcgttgagcacctcttccttgtcgaagatgttgcggccgtcgaccaggatgttgtcgcgcatgagcgtgagcaattgcggccagtcgggcatccggaactgtttccactccgtgacgagtgcgatggcatcggcgccctttgcagcttcgtacatcgaacctgcgtaatgcaccccttcgtcgccgatcctgcggcgggcttcctccatcgccacggggtcgtagacccgaaccgtggcgcccgccttacgcaacaggtcgatcaccaccagtgccggcgcttcgcgcatgtcgtccgtttcgggcttgaacgcgaggccccatatcgcgatggtttttccgtgcaggtcgcccagtgcccgttgcagtttgccgaacaggatggatttctgcccttcgttgacccgttccaccgcctcgatgacctgcatcgtataaccgtgttcctgggccgtacgggccagggctttcacgtccttggggaagcacgagccgccgtagccgcagccggggtagaggaacttgctgccgatgcgggcatcggatccgatgcccttgcgcaccatttcgacgttcgcccctaccaggtcgcagagattggcgatctcgttcatgaacgaaatgcgggtcgccagcatggcgttggccgcgtatttggtcatttccgccgaggggatgtccatgaacagcacccggaaattgttgatcaggaacggacggtacaggcgggtcatcagcttgcgcgcccgttcgctctcgatgcctacgaccacgcggtcgggcgacatgaaatccttgatggccgcgccttccttcaggaattcggggttcgaggccacgtcgaacggtatcttgcagccgcgtttgtctatctcttcccggatcacggccttgaccttctgcgccgtaccgacgggtacggtgcttttggtgacgagcaccgtatacttcttgatgttgcggccgaacgcacgggcgacttcgagcacgtatttcaggtctgccgaaccgtcctcgtcgggcggtgtgccgacggccgagaagactacttccaccttgtccaggcagtccgtcaactcggtcgtgaagtgcaggcgcccctcctcgacattgcgtttgacgagttcttcgagccccggctcgtaaatcgggatgaggccgttgttcagggcgtcgatctttttcctgtcgacgtcgacgcacgtaatatcgagccccatttctgcgaaacaggcacccgatacgaggccgacataacccgtacccacgactgcgattttcatcatattatgtccaagtttttggttggtttagcggtgcatgcacccggcgatccgcgctgcgagcgcgtggcatgcctcgtgccatgccggcgagaaaccctgcttcatttccacgggttcgcagatcgcctcccacttcatcttctgtgcgaattcgcccaggcagcgtacggcggcactcgcccagcagaaggagccgaaccagccgaagttgcgctgcgggacgcagcgtgccgcgatcaggtcgagcaggcgtgccacgggcgggtagagccctccgttataggtcgggccgcccacgatgagcgtgtcgtaacggaatacgtcgcgcaggacgatggattcatcggcgtaggacatgttgtggacgaagatcgggcccacaccttcggcggccagttcgcgggctatgcgctcggccatctgctccgtattgccgtacatcgagccgtaggcgatcaccacgcccggttcgccttcgtagcggctcagacggtcgtagacgtccatcacctgcgggatctcgcgctgccatacggggccgtgggtcgagcagatggtcgtggggttcaggccccgtaccttcgcgagcgccttttgtacaggccctccgtatttgccgacgatgcaggcgtagtagcggcgcatttcgtcccagtagcgcgacgggtctatctgcgagtcggtaatgccgccgtcgatggcgccgaacgtgccgaaggcgtcgcccgagaagagcgtgccggcctcggcacaccatgtcaccatcgtttcgggccagtgtaccatcggcgccatgtagaacgagagcgttttcgagccgagcgatatgctgtcgccctccttgacttcgagcgtcccggtgtcgatgccgtagaatccctggagcatctgcagcgtcttggcgttgcccacgatttggatgtcggggtagagcatgcgcagtgcgcgcacggacgacgagtggtcgggttccatgtggttgatgaccaggtagtcgatcttgcggtcgccgatggcctcgcggatgttctctgtcagacggctgccgaagccctcttcgacggtatctatcagtgcgaccttctcgtcggcaaccagataggcattgtatgaaaccccctgcgggagcgaccagagaccttcgaaacgggtggttgtgcgatcgttgaccccgacgtaatggatgccgggcaaaatttcggtgatgttcatggttcgtgacgtatttgtttcaaagatagtgaaaaatatgccaaagcggaacggcgcgggccttcctgcatgcctgattttccctatcgtccggtattaaaaatttgcgtaaagataaccgttttttcggatatgcgtaaaatctgtttccgaaaaaaacaattcccgcgtgatggggcggctgcactgagggctttccggccggccgggtgcctgcggcgttggccgcgcgagcttcttcttttaattgcttaacttgctgtgcattagtttggtatatgtatgaaaaaaagccttcggcatttaccgaaggctttggaaatattacaagccggggcttagagcaaccggaagaaatccgagcgtacgccctgcatgctcaccgcgtcgttctttaccgactccggaatcgtcgcacgagtgtatacgcacacgtcgccggtgtcggccgtgctggtcagcgtgatggtgttggacgattcgtctgccgtgaccgtgtacgagcttccccagggagtgttgtcgctgtaatttcccgaaagtacatcgcctttgagcaagtagctgcccgtgtatttctggtactttacggattcgatcttctggtagatggtgaacgaccctccgtcaaatgcgatgtaggcgtcgaacacctgcggagcctggcctgtccatgaggtcaggcgccattctccgacgagttgcttggccaacggcgtgttgttatctttcttgtcgtcgtcgcaccctgcgaacaggctcatgccgagtatggcaaagagaatatagatagtctttctcatgatctttttgctgttatcgtaattcgtattataaccaacctccgttcccggcctgtacgccgcgggcgatgatggcgaactccttggtgatcgtcatgccgcccatcacggtacctgtaccgaccttgtcgccgccgccgattgccgtaaccgtaatcttcgctacgccggacttggtgcacttgatcttcagtttgccgtaggccattgtgggcaaggtttcgatccccaatttggccatgtcggctgcggacatcgaaacaccggtgtaggtgaggttcgttgcgctgccaccgaagaactgcgtcaggggaacgagttcttcagcccctacgccgaccttgaggcacggcgtgccttcgatctgcatcagcagttgataagcgtctactgcgcctgtacccagctgcttgcggtagttttcgaggtacatcgtgccgttcgactcctttgtgccgtcgagataccgttccatgtcgttcaccgaggtgaggagcatgctgataaactcgttgcgggtgtagtgcttgccttgtttcagcgcataggagagtccgagtgctgccacgcccgacacgtgcgggcaggccatcgaggttccctgcatgtatccgtagtccgaaccctcgttcatttccgaaggcatcgtcgaaagtaccgtagcggtcgaattgcttgcaatgtaagcgtcgccgcccggcgccgagatgttacagccggggccgtagttggtgtagcttgcaggcaggaagtcgggcgagaacgaggttaccgaaatataatcgcggaacgccccggggtacccggcacggtcgagtgcgtcgttgccggccgagaagatgaccagaccgccgtcgatcgcgtcgcagttcgacgtggcgatgaaataggcgagtgcgtcgtgctccgctttggcatttttggcgtactggtcgtcggaggtgtagccaccgcccttgatacccatcgagcactggatgatcgaagcaccgttgtcggccgcgtatttgaatgcccttgccatgacggccgtcgtgcccgaacctgctgcggtgccggacagggcctggcacgacatgatccgtacaccgtcgttgttgcccgagccgcccgctactccgcagacaccgatgccgttgttgttgaccgccgctaccgtgcctgcggtatgcgtcccgtgaccggagtcgccgtcgccctttgcgtcgaccacatcccaggagatggggccgttcgtaacgaaattgtacccgtaataatcatccacgtaaccgttgccgtcgtcatcgacgcccgtggttccggtcatctccctggtgttgacccacatgttcgcagccaggtcggggtgcgtatatttcacgccttcgtcgactacggctacgatgatcttgggatctccggccgtgagtttccatgcctcttccacgttgatgtccgcaccttcgcgcgcggtctgtgccacggccttgtcgcctttgttgatatagtgccactggcgcttcaattccgggtcgttgaacggccatacgatcgaacgtgtgcctgccgacatggcgggcgcatccgaacggagcggggtggccttgccgtcccacattttttcgagcttcgtgttgaactggatgttcgccacttcggctacggccgacagtttctgtgcggcgagatccaggtcgacttcggtgtcgaactgcaattcgtaccacctgtgcaggccggccgcacgtgtgcgctcctcgttgcgtgtgtctaccgggaacaggcggttcagggagctgacgttcagctccgaaagtatttcatccacggagacgatacccgcgcgggtagcgaccgaccgtgtcttggcggcggcttcggcggcctgttcgaggctgccgatggctgcgtcgtcgaaatagacgagcaggcttccggcctcggcattgaccgaggtgttgacgatcttatgcgatgcggcggtgttttgcgaaccgccgtcgctaccttcggtcataaggtcggacgtacagctcgccagcagaagcgctgcaatgagtagtaattttttatcaatcataatccgagttatttttttgagggtctcccctccccgatggaaggggagaccgctcttgatcactaattgggtgaacgactgaaattatttagccatttttttcaggggcattttctccatgcctccgctttgcaggctgtttgcccggggtacaaaaccttcggagaatgaactcatcgcgggagttgcgatccgaacggacacctcaccttcgagcgggttcgcgccgcggttgacgggcttgccgaacaattcgtcgatcagggcgtgggcacgttcgcggccgcgcagttcgacgtagttcgaggggttgatggaaatttccttcgagagggtcagcatcttatccgaagcaaccttgcgcggcgcagctgctcccgtgttgccaccggtcgccggtaccatcagcggggaggtatagctttcccagttgccgatcgagttcgtatagttggcatccgtgtacgccctgaccaatatggtgtcgaaattatacttgtctgagaagtcggggctacaaatcagggcgaggtacccgtcttccgtgacacctccgaccatcatgccgtcgattgtgtccgcacccatgctcgtttctttgtccagaatgtaatacttgagatagagcgtcgctccctggtacggaatggtgcccatgggctgccctttcagaacatagatgatcccgttgtaccactcccagacaaccgtgtcttcgttattggctccgagcgagaggcccgcaacattgattgcatccagattgctggtatcgtcggtctcgttttccgagaatacgacctggccgatcttcgagcgattcgttttgccggagccgtcattgtttatgccccacagatcccatgttttgaagagctgggctttattagagaaggtataaagatcgtcaatggtatatttacgctgcagcggatctgccttgccggcagtagtctgttctacggcgaacagtttgccgttgtaaccgttgtcggcgtataccagcagtgtgtagctcgtaccctttgacagcccaacatagaaaggagcgtagcccgtatcgttgatcttttcgagctgttcggcggtcaatgccttgccggatgccttgacaccggcgatcagctgcgattcgttcatgccctgggtcgaagccgtcgtgaacaggccgatgtagcccgatgcgatctcctcgccgaacaggatccccttgatcgagttttcgggggtgtggccttcagactctttctcccacgtaagctctgtgcggacgctcatcacgacgggtttttcctccccggccttgacgtaaccgaacgatacgtacccgtatttctggaggttgcctttctcgtcataagagttgccgacgatggtgtagataccggtcttttccatgacggcggtgatcgtacccgaagccgtgatctcctcgctcggggtcgtacctgcgtcgatatctcccgatttggccgcagcgagcgactcgctgagcgcaccctcgaagaaggcatatttcaccttgtcgacgtcgctgccgagcgtagccgtgatggcgaccttgccgtctgcgggcgccgacttctcgaaggctaccgagtaatcgtagcttactgcacccgggaataacaggcgggtcatttcggtattggccttgaagtagctggttgcttcccatagcgaaggtgtcgtcagaaggatcgctttcggcgggaaggtgaggacgccgttttccagcgtaccgtacatcgtggcggaagccatggtgggataattctcctggcagaacgaaacgatcacgaatgcgccgttgtcttcgtatccgacgtcgttgatctcaaaaccagtcggctgtaccgggaaccatactttttcgggatcccgtgcgtcgatgatggtataggtaggaacggagggtacgttggagtaccttacaccgacgatcttggccatgtaggcttcgtcgtagatgttttggatacggtagtaccccttcatgtcggcacgttcgtaaatctcgactgccttttctgcattggggacaccgttttcctttatgttcgagcccattatcgccgtgaagaaatcgtcgcgccacgtgcccttggtttcaccgttgggacccttcacgaggttccactgtacgcgggtgacgctaaaatcgagcccgttggaatattccccgtatagctgcgcgtatttcttgtccgtcacgcggatggaacattcgtaggttttgccgatctcggcattggggaaatccacggtaaattcggtctcctcctgtcctgcttcgaatttgatctccgaaacagtgaagatgccgtcctgagtgccggtgacttccacgggaaccgtgatcgcatccttgtagttcttgcgcttggccgtgaacggcagggtcgtaggctctgccggatcgcgttcattgtctgtggcatattcctgcgaggggaaatatacgccgtagcagtccggatcttcgccttctccgggagtatatttgatgtcgtccgagcatcctgccaatacgaagggtgctatgaacgcgaacaataaatatttgattgttttcatactattcgatctttggaattaaagcaaattttgcattctccggatacctattctgtccaaaccggaatcttacccgaggggtcggggttgttgactacggcgggattgttctggatttcaccacgggtgatgacgaaattccagtggggagcgcggccgtcggtattcagacggtaatccgagggagagttggtgcctttgtaaccacgcttcatcggcatatccaggcgtttcaggtcgaacatgatgataccttcgccccagaactcgatgcgcttctgcgtgatcagttcctcgatgaaactcttgagcgtcggcgtacggtcggtgcaactgtacgaaccgtcggtaatgcggtatttcatgaacgtattgagcaactcacgagctgcgaccagattgctctgggccgtagcttcggcttcgatgagatacatctcttcgacgcgcatgcacgggatgtccgtagcaccgccgatcttgtagtcgctgtaagctccctgtgcgggacggaatttgatgttgacgtaatccttcagcgtagcgaaatatgcactgccgttggggcggcaactcttgtacgcgtagaagttgcggtcgggatcgagccacgagtgcttgcggaaatccttgttgtcgattttggtatagaactccttgtcgatggcgcgtcccacctggtgtccgtagccccacgactcctcgttgccgatgtgggcctggaaattcatcaggttggtgacgttgtcgctggtgatcggcaggccccagatccacgagttgttggccgtcgcactattgaagccggtcgtggggtcttcccactgtgcctgggtcaagggagtacagccgctcgttgtgatagccttacgggcatattcggcagccttcttgtaagcctcggagtcgttgtcggaagttccgcgctccagatatgcacgggcctggaggccatagaccattgccaggctgggcgtatagggatctgccgccgagtaatcggaaaggtatgccgccgccttttcgaggtcggggaagattactttttcgtacacctcggccgccgtagcgcggggattggctttggcttccgcttcggtcgtcgtttccgtcacaatgggcactgccaggccgacaactccatcgccggaggtatacttgttctccttgaattcatagatgcgtaccaagtcgaggtagaacgaggcccggtatgcgtaggcaaagccgaggacatgtttggtcgcggtcgtgagagcttccgggtcgatggtgctgatgatatcgttggccgccttgatccatgtgtaatagtttttccagggcaggtcgccgactgcatagttgtcgccgagggagttattggcaccccattggctgaaccagtcgtagcccgtatcgcccgttatgacgatctcaccggccgcagagtccgtagcgaggtggatggccggcagcgcgaagttccagtgcatcttgtcataggcagaaagagacctcggctgtatcaatgcggtggggatacctttcaccatagcttcgagggctgttgaagacccggcgagctggtcggacgtagccctgtccgtcgggaacgtctccttgatgcacccgctgagcagtgctgccgaggcaagagccgctatagatattttcagtatatttttcatatccgaataattagctggttatggatttagaattgaatattgataccacccgagatggttcggatcggagagtaggtcgctgcgttggcagtacccagaacaccctggctgtccgtattgtcggcgtaacgcggatccagtcccttacgcttggaccaatagaagacgttttcgcaggcaagatagatgcgcaacttgccgactccgaatttctgggtgaatttcgacggcagcgtatagccgaagttgatgttctgcagagtcaggtagctggcatcggtcaggaaacggtcggacgtatcggtcgcattcagatcgccgtattgcagacggggaatgttcgaattcggattctccggtgtccacgctttgagcatatccttatgccagttcacgccgatgctgccggtcgaggtcggaacgctcattgccgctgcgtaccccgagtcgtagactttgccgccgatctggtagttgaagttgatgccgaaatcgaatccgaagaacgaaacgctcgtgccgaaaccgccgaacaggtcggggatcgcattgccgcagaggtaatcgtccgcttccgagtattccgtggtggtagtccgggtatcgccctcgttcttataccacatggaacgtccgtcctccgagacgcctgcgtatttcttcatgtagaaagtatacatcggcagatcctgtccgtagaaatagatgccgctggtgtaaccgttgtagccgtcgacctgcaaagtgcggcgctcgggcggcagcagggtgattttgttcttgaggtgcgtcaggttcacgctgatgtcccactgcacgtttttgctgcggatcggggtgaagttcaggtcgatctcgatacccttgttcgacatgtcgccgacattggcatagtaggacgagtaacccagcgacggagccgtggggaatgccatcagcatgtcggtcgtcttgcggttgaaatactcgatgctacccgatatgcggttctggagcacgccgaattcgataccggcgttgaagttggtattggtctcccaggtgatgttgggattacctttttgcaggaatgccacggacatttcgccgttcgaggaggcgaggcggtaggtatccacatagcggtagttaccgatcttgtcgttaccctgcgaaccgatcgaggccttgaccttcagcatgtcgagccaactgtgcgtcccggacatgaaattctccttgttaacgatccatgcggcacctaccgaccagaagttaccccagcggtgcgacgggtggaagcgcgacgaggcatcgcggcggtatgaggccgaggcgaagtatttgccgtcgtaatcgtactgtgcgcgcccaaaatagccttcattattataggtggtgacatacgatgttgcgccctgcttgtcgatcacggcaccggccagttcgtcgttgtcgggcgagaacatgttggccgtgctgccgtaaagcaggtactgcctgcgctggtagtattcgtggccgagcatcacgttgatattgtgcttgccgatgaccttcgtgtagttgaggatctgctggaggttgtgcgagaagtcacgcgtatggtatttgcctatgataccgttttcccctgcgaactgtccgtaataggggttctgtacggtcgtctggcgggtttcgtcgagcgaaattcccgcattgaacgtaaatttgaaatccttcaggaacaggatgtcgaagaatcccgtgccgttgaaggcattgccttccgaacggttggtgttcaggcgggaatccgacagtccgttggcattgggcatatacggacgggtcagtccggcattcatgccgtcaccgtagtcgtacatggtgatgccggcgtcgttcttcatgatattgccctgcccgtcgcggacatagagcgggtaaatcggagctaccgacgtagtgaacgcaaagatgttggccgacgaattgccctggccgtcaccgctcagcgaattgtaggtgaagtttgcgtaaccggcgttggcaccgaccttcagccatttcttggcctgatagtctgccttcagacgtgccgtgtaacgctccatgttcgaattttccgtgataccttcgttgttcaggtagccgaacgaagcatagaacgtgctgcgatccgtagcacccgatacactgacgttatattcctggcgcatcgaggagcggaaagcgatgtcttcccagtcatcgggcgtgagcagataatcctggccgttgtagaacatatggttacccagcgtggcgttgggattgagtttcccgttggtgccgataaccgattggccgtcggggacactgtaaaccatatagcccagaccgccgtcgtttttcgaagcggcgaggttcttattggccatggcgtgtgcggcgctctcgctcataccctgcgagcggtagtagctgctgagagacgaatagtaggtttcgtagtactgcgcagggcttttgatataatcataggactccattgcgcgtgagttcacaccccacttggcatctaccgagatggtagcttcctggccacgggccttcttggtcgtgatcatgatgacaccgttggcaccacgtgctccgtaaagggcgttggatgcggcgtccttcaggacggtcatcgactcgatgtcgttggggttcaggttgttcaggtctccttcgtagggagttccgtccacgatccacagcgggtctttctcggcgttgatcgaactgaaaccacggatgcggacgatcgggttggcacccggtttacccgattcgttggatatctggacaccggcaaccttaccggccagcgactgggcgacgttcgactgttgcgacttggcgatgtcgtccgccttgatgacggtcgcagaaccggtaaacgcctcctttttggaggtaccgaacgccacgacgatcacgtcgtcgatcgcctgtgtatcttcgtgcatagtcacgtcgatgcgcgatttgccagcgatagggagctgctgccccacatatccgatgaacgtcaccgaaagggtgccgtcagccggagccgaaagtgagtactggcctgccgcgttggtcgtagtaccgatcgaagtaccgtctaccatgacagtagcgcccgcaacgggattcccgtttgcgtcagaaactgtaccggagacctgcttgttttgggcgaatgcatatgcgccgagcaccaaaacagcaattaacgatagtacaatttttcttaccataagcgttaattttaaattaattttaaaataaaaactcaacagcctgtgagcaggattttacgattctggtaagatactgaatatcatatatatagttgagtgaacgcgagattgcgatccggttttgaaaaggcgcggtaacttgaaagttacctgagggtgcggtgtataaaattaatttacagcatattaacgactgcttgccatatatcttgagttaccaatacataaccgggaaacgactggtaatgccctgcgattccccgaaaatcaacgggatggaataatatgactcaatataatccaaaaaatccgtatggattacagttgccggaacccgtatcaggatttatccgggtaattccgccgggcatcgcggcaatactccggatgccgtaacgctatcccgggcatcataagcccccctgccggaatcccggcagcgacagggaggggctatcaatacgcacactgctcaccggacggtacgggcataaaaaaacccggaagcgtcacgacttccgggcccagaaaataagtattaaccactaaagcggattctggtcggccgcattgatgtatggattgctgttcagctcgatcgacagcggaatctggtaggtgaattccttgccggcagccttgaccagcttgtgcgtgtggttggaggatgccgtacggtctacaccgacgttgaagcgcttgttggtaaagaattcgtgcccctcaccccagagttcgatacggctctgcaggaagatctccttcagcagtgcttcgcccgtattcgaggactttgcataacccgaatcgcgcttcgacaccaggtcgtaaagcgtctgctgggctgcggaactgttgccgccgcgggcttcggcctcggccttcagcaggtatgcctccgacaggcgcatgtagatttcgtcagcctcgtaggtcggggtgttgaacttgacgttcgaataggccggataggtgaactccccgaccgtggtctcggtcgcattgaaattcttcttgcggtagtcggtagctgcgatctgattgtagagctggtcgtcgatagccatgtagatacccttgttgttggcattgtccacggccgtgatcgacatgaacgatgcgaaggaacggttgccgagcgacgtggaagcagcccacgtgtagccccagatggtctcgggaagcgaggtgctctggaaacccgaagtcgtatactgctcctcgttcatgagcgagtagcctgccgaaatcaccgccccggcagcattggctgccgtggtgtaatcgcctgtggtcagcgccacgcgcgccagcaccatgttcgcaaccgtctggtcgatgtccgccgtcgaactcttgggatcgtagccttcctgctcgaacagcgcgatggcgttctgcaaatcggtcgtgatcgtgctgtaaacctcggtcgacggggtgcgtcccttggcaccctcgacggtcagatagagggggacacccgccttatccttgccgccgtgcatgtagtcgtcctggtaaacgcacatcaggtaatagtaagccagcgcgcggtaggtcagcgcctgagccttatataccagcgccttgcccgtaacatcgtcggggatcaggtcgaggatctggttcgactgatagacgatcttgtagtaacagtaccagcggtctgccgtataggcattggtctgggcgcggatgctttcgaacatatattcgtcggcaaaccagttggtcagtttcgtgagcaccatatcgttgccctgcaaatccatacccagattccagaccatgaatccgcggtcgttggtcgttgcctggcggttgccggtatgcatgtagttgacggctccctgcatcatgggggcgagcacgaggtcggcattctccttgatcagttcgcccagctgctcatccgacacctggctgcccgaaggctcggtgtcgagctcgctcgcacaggatgcgaacaggagcaccgtagctattgcgatgtaatatactatgtttttcatacgctaatatctcgtttattataagttcatcgtaataccgaaagtaaaggtcttcgcctgcgggaacccgaatgcgttctgtcctgcgtaagcggtacgcgggtcgaagcccgtatgcgcggaggtgaagtagaggttgtcggcggcgaagaagacacgcagcgactcgatgcagatcttcgacgtccagcgcttgggcagcgtatagccgacgttgatcgtcttgaggctgaagtaggaagcatcgcggtagaggtagtcgcagttcgaacctacgaaattccaggtgccgttgaacatcagcttggggaatttggcattggtatgctccggcgtccaggtgttgcccacgaggtcttgcgagaccgtaaaaccggcacgtcccggactatatacgttggccgagttgccgtcccactggcggccgccgatctggtaagccgcagccagcatgaaatcgaagttcttccagcggaacgaggtgcgaaaaccacccgtcacgtcgggcagcgcatcgccgatctcatactgcgtggcttcgttgatattgaaggtcttttcacggcccgtaaccttgccttcgccgtccacgacatctttccagaacgtctcctggccggtttcgggatctacgccggcaaacttgaagaggtagaggttgtagtaggacttgcctttgccgcgcaggaacctaccgctgatgtagtcgccgcccaacgccgggttgcccagctccgaaggatagtcgatcaggcggttgcgtgcgaacgaggcgttgaccgcgaagttccagtagagatccttatgcttgaggatgtccacgcccaggtcgatttcgaaaccgcggttagccaggataccgacgttttccaggcggctcgcaaggcccgtcgacgacggggtcggacggttccagatcaggtcgtgcgtacggcggttatagtagtcgaccgtaccgtaaaaacggttccacaggcggaagtcgatacccaggtcgatctggtagttgcgttcccacgaaagattgcggttacccgtgctggcttgcgtaatgccgatctggccgttggtttccccgatcgtccagaggttggtgtagggatacgaagccgaaagctggttgccggccacaccgtagttgacgcgcagtttcagttcgtcgacccacgtagcgttgtccatgaagctctcgcccttgatacgccatgcggcgcccacagaccagaagtggccccacttgtcgtacttgaagcgcgacgatccgtcgtagcggtacgaacccgagaagaaatacttgccggcgtagttatagttcacacgtgcgaaatagccttcgatggcggtcaccacggtgctcgaggtcgagccgttgctatactgcgaaacggcgttgcccagttcggggatgcccgggtagaaaatatttttcttgtaggcgtccacgacacgctggtcggtcttgccgaactcgtggccgatctgtacgtcgaagttgtggttctccttgatggtcttgttccagttgagcatctgctgggtgttgtacgagaaatagttatcgttgtatttctcgacaaggccgttgttggtcggcgtggcagccgtaccgtattcattgttataatagaaggtatccatccggtacacgttgtccagcgtgaagttggccgtgaacttgaaatccttcaggaatacgatctcgccgtagaaattggcgtagaggttgtcgcgaaccgagttgttgatatcgcggctcatcgactgcacggggtgcgcgaagttgttgaacgagttgaactgatcctgcgtcgcaccgtagggcgaaagggtcgtgccgttgccctgttcgtacatcttcgtgccgtcggcattgtagcggatgttaccgtccaggtcgcgggcgtagtacggcacggtggggttctgccacatcgtccacaggaacacgttacccgtgttggcacccgaatagccggggctgtcgatgtcgcggcgcgaataagaaaggttcgtcccgaccttcagccacttggtggcctgtgcattgaaggcggcccggcccgagtaacgcttgaatcccgacatgattacatacgaggggtcttcgaggaagctgcccgaaacgtagtagtccatcttgtcgttgccgccgctgatgctcagcgtgtattcctgacggaactgcttggtgaacaggtagtcgtcgtagttgtcggcatagagcagtttcgcgtcggaattgagcttgcccgtggcggggtcgatcagcgtcgtaccgtcgggaatcttataggccatgtagtttccgagcacgggcatgaggttggagttcgccgcattggcaagcgcagcatggctcgcccccggattattcgcctcaaggtagttataaagcccgccgtatacatattcgtaatagtcgccggggttctgcatggtctcatgctctttgataccctgctggttccaaccccacttggcttcgaacatgatgttggccttctggttgcgcgttcccttcttcgtggtgacgaaaaccacgccgtttgcggcacgcgaaccgtacagcgcattggcagcggcatccttcgacacgacgatcgactcgatatcgagcgggttgatcgtcgaaagcgccgacgaataaggcacgccgtcgacgacgatcagtgcggtctggattccattgatcgaaccgataccgcggatgatgatcgaagcgtcgtcaccgggctgtcccgtagagctgtacgactgcacaccggtaacggcaccttccagcattcgcgaagcggaagcaacggtggtctttgatatttcaccggccgaaaccgatgcgatcgaaccggtaaaatccttcttcttgatttcaccgaaggccgtgatgactacattgtcgatcgcctgtgcattctccttgagcgtcaccgaaacatgggtgtgcccggcgatcgcgacggtctcggtgtcatacccgatgaacgaaacgaccagtttcccgtttgcaggggctgcaagcgagaaggtgccgttcgtacctgtcgtggtaccgatatgctggccctcgaccatgactgtggctccagccaccggagcaccggcggcatcggtaactgtaccggaaacctgctggttctgggccattgcaacggcgcaaatccccaaaacggcaattaacgatagtacaatttttcttaccataagcgttaattttaaattaattttaaaataaaaagttcacaagcaaagataacggattgctaactcatttacaaataaattattaaaaaaaattaacacggttacagctatctttcaaattgtggttgacggcttacgatttttcgcgtataaggcctgtggcgattacaatttgcaatcgccatttcgaagcgttttttgttgatttcgggattttccccagccggaaggggatgcaaggggtgaaaaaagtgacttagtagagcctttccgactcgttcggcatgcccgacggcgtccagtcggggcacagcgagttgatacgttttgacaggcgttccatctctccgctgatatgcgaatgggtgatattcgcatagatctgcgttgtgcgtatgtttttatgtcccagtaatttactgattgtttcgatggcgacaccctgcgaaagggtaattgtcgtggcaaacgtgtgccgggccgcatggaacgtgatctttttcggaatccccgcttcggcaacgatcttgtcgaggcatttattgcaccacccgttgctcggaaggtcgaatatccgtccggagcccgatgcgggcatgtatttcaacaggatattgtacgggacggtaaacagccgcacattgacctccgcccctgttttacgacgtgtcgtgttgacccacagctgtttgtttattttctgaatattctgcggcaccaggcctcggatgtcgacataggacaatccggtgaagcaactaaacaaaaacgtgtccctgacaagttgtaaggtgaggtcttcgctctcgtactgcatcatacgggttatctcttccatggtcaggtagttgcgtgttacgaattcgctctgtaatttgtaatttgcgaagagatccttgtccatatatcccttgctgcgggccagcatgaggatatgtttcagggcgatcatgtaaatccagatcgtgtttttttttatacccggcttcctttgcgatataggcgtggaagcccgtgagaaattcccggttgagctccttgaacatcaggtctttccggtcgtacttgtcccagatgtagtttgccagatgcttgcagacgcacctatatttataatatgtggccttgctgcggctgatgccgaccatacggttgaattcttcgttgtgctgcctgaaaaaggcgagcacggtctcctgacggaggttggctccaaagtacatctctttgaccatcaagggggttacgaacgattgttcgtagaataacttgttgtaacacctttcgatgtggtagtggatattcgaaagctgttcgttgatcctgcctgcggcattgctccgcccggcgacacgccccattccgacatcccagtgttcgggtgcgaccgagaggcgcgtggaaaactgcgtccgctccccgttgatcgtgatgcgtcccatgatcggggcgttcccattccggagaggcgcgtttttcttgatgtaaaacaatacattaaacgtgtttctcattgctcaaataaccttttgtgtttaacctaataacaatatgcaaaccgcattaaaggtaatgattaagtaacccccgaataacgtattattcggtctaaatatcttattgtacagatgttagcctgtgcgaagcggttactttgtagtaacactgctacaatccgacatggcatttatggagattcaaatgccttttaatcagtctattacgtttggattagccgattttgcgccagaaaagaccttgtgcgctgaatatcatggtgttgtataaattaacgcacaatgataactttttattttaaaaaaccaattaaaattaacgcttatggtaagaaaaattgtactatcgttaattgctgttttggggatttgcgccgttgcaatggctcagaatcagcaggtttccggtacagttaccgatgccgccggtgctccggtggctggagccacagtcatggtcgagggccggaatatcggtaccacgacaggtacgaacggcaccttttcgcttgcagcccctgcaaacggaaaactggtcgtttcgttcatcgggtatgatacggaaaccatcgcgattgctgggcaaaccaatgtcgcagtgacgctgaaagaaaacgcacaggcgatcgacgacgtgatcgtcgtggcgttcggtacgacgaccaaagaggcttttacgggctcggccaccgtcgtgaaagccgaagatattgccaagcgccaggtttcgaacgtcgcacaggctttggccggtgccgcagccggtgtgcaggtagccagttcgtcgggtaatcccacctcgacacctacggttctcatccgcggactctcgtcgatttcggccggcgtgactccgctctatgtgattgacggcgtgccttactcgggagatctgaacatgctcaacacgtcggatatcgaaacgctgaccgtcctgaaggacgcggcgtccaccgccctctacggtgcgcgcggtgccaacggtgtcatcatgatcaccaccaaacgggccaagggccgggaggcggtcgtgagcttcgatgccaaatggggtgtcaattcccgcgccacgcggctctacgattatatagataatcccggggattactacgaaacctactacaagtcgctgtataactactatctggccagcggtacggccgaccaggcacatatgcgtgccaacaacctgctcaccagcagcaacgccggcggtctgggctaccaggtttatacggttcccgacggcgaatatttcatcggtacgaacggcaagatcaaccccaacgccacgctgggccgcaaagtcatttacaacggccaggactactggctgaggcccgacgactgggaggacgaggcctaccgcacctcgctgcgtcaggaatacaatgtaaatatttcggccgcgagcgaccgcgccaatttctatgcgtcgctgggttacctcgacaacgagggtatcgtagccaattccagttttacgcgttactcagcccgtttgcgcgccgactaccaggccaagaaatggctgaaagtcggggccaacgccagctattcgcactacgagagcaaggcgctgcaggacgagtcgggctccggaggtacgaccaacgtgttcgccattgcgaaccagatcgccccgatctaccccgtctacgtgcgcgacggcaacggcaatatcatgagggacgacaacgggtataaaatgtacgactacggcgacggcatgaatgccggactgaaccgtccgttcctgcccaactccaatgccttgcaggccatccgcctgaacagcgccctcaccaacggcaacgctttctcgggtacggctttcgccgacatcaagctgcaccgcgacctgactgcgacggtcaatataggtacgaacctcgacgaagcccgttccaatacggtgacgaatcccttctacggccaattcgccggtaccggccgcgtcgtcgtcgggcaccagcgtacctacgaggtcaatgcgcagcagatgctcaactacaaccacacgttcggcacgcagcaccgcttcagcgcgatgatcggccatgaattctacaacctgaagagctatacgctcagcggcgccaagcagaacatgttctcgatcgacaacaacgagctcaacggtgcagtcgtggatacgcagaacgccgcctcctatacgacggaatacaacaacgaaggttatttcggccgtgtcgagtacgaatacgacaaccgcatcgtcctgaacggatcgtaccgccgcgacgcatcgtcgcgtttccaccccgaccaccgctggggtaatttctggtcggcgagcgccgcgtggctgatcaaccgcgaatcgtggttcagagccgattgggtggatatgctcaaactcaaggcttcggtcggttcgcagggtaacgacaatatttcgaactacctctatgtggactactattcgatcgaaccgtcgggcgaggacatgtccatcgtattctcgcagaaaggtaacgaactgattacctgggaaaccaacaccaatatcaacgccggtgtggacttcgaactcttccgcggccgcctgggcggtaccgttgagtattttaaccgcaagacttcggacatgctgttctggttctcggtagctccttcgatgggttattcgggctactacgccaatgtcggcgacatgcggaacagcggtttcgaaatcgacctgcacggaaccccgatccagacgaagaatttccggtggaacctcacgctgaacatgtcccactacaaaaacaaggtcaccaagctggcttccgagcgtaagaatgcgaccgtcgaagggtatgacggctatatcgacggcaacaaattcgtgggcgaaggcttgtcttactatacgtggtatatccccaaatatgcgggtgtggatcaggaaacgggtctttcgatgtggtataaggacgtcaaggacgccaaaggcaacgtgacgggccgcacgaccacgacgacctattccgaagctacgaactacctgggcgaatcgtccctacccgacctctacggcggcttcaccacggccttcgagttctatggcgtcgacatctcggctgcgttcgcctaccagatcggcggcaagagctacgactcgggttacgctgcggccatggcatcgccttacggttcgatgggcggcaccaacatccataaggatatcgccaagtcgtggaccccggaaaatccgtcggcgtcggttccccgtttccagtacggcgacgacaccagcaccagcttgtccgaccggttcctgttggatgcctcttatctcaacatttcgaatatccaggtaggttatacgcttccggtttccttcacccgtaaattcggtgtcgagcggctccgcgtctatctggcctgcgacaacgtctactattggtcgaagcgcgagggattcgatccgcgttacagcttcacgggtaccacgggttacaccaactatgctcctatccgtacgatttcgggcggtataaacattcagttctaagttttgacgggtacatacaaatcagattttatgaaaagatatttgaaaaatataaccgtttcggcgctggcggcggcttcgctgtcgttcagcagctgtatcaaggaaacttttcccacgaacggtgcgacggccggccaggtggcccaatcgactacggcgctccaggccatggtgaacgcaattcccacacagttggttctttacggtcaaaattacgcgcaggcctgggatttcggttaccccgcgatcaacgtatcgctgaccagcatgacgggcgacatggtcgtggccggaaattcgggctacgactggttcgccaactggatgaccaacgtggccctcagcgaggactatgtgacgggctaccagttctggtacaactattatagctggatcaagagctgcaacgacgtgatctccaccctctcggcggtcgccgaggaggacatgaacgacgagcagaaagcctatctgggtatcgcgctcgctttccgggcgcaattctacctggatctggtacgtctgttcgaggccaaggagtgcacgggctcacaggtcaagaactatacgatccccgagaacatcaaggggctggcgtgctgcatcgtcactgagaatacgaccgaggaacagtcgaaaagtaatccccgcgctacggttgacgaggtttacgaccaggtgattttccccgacctggagcgtgccgagcgcatgttggccgactacacccgtacggtgaagaccatgcccgacctgagcgtcgtatacggtatcagcgcccgtgcatggctcgagcgcggctccgcaggtgtagacggcgctttcgcaaaggctgccgaatatgcccgcaaagccatcgaccagagcaattatacgccgttgacgcaggagcagtgggaagaccccacgaccggcttcaacagcgcaacctccaactcagcctggatgtggtgtacctcccagacctccgaacaggttcacaacctctattccttcatggctcacatgtcgggcgaggaacagtggacgaactatggcggcaagggcgtggggcgcgctatcaactcgaagctctatgcgctgatcagcgacgacgacttccgcaagcactcgtggctcgatcccgggctgttcgactactacgagtacaagagttgccgtccggactacaaggagttcttcgaccccaactccgcggcgtcgaccaaattgcccggctcgctcgttgccatcaagttccgtcccggacagggcaattatacgacctatacggtgggtaatgccgtcgatcacccgctcatgcgcgtcgaggagatgtacctgatcgaggccgaggctaccgcggcttcgaacctctcgaacggtatcgcattgctcaacagtttcatgcagacctaccgctatgcgtcctacaactgccagtcggccgatttcaaagccttccagaacgagatcggtctgcaggcccgcatcgagttctggggcgaaggcattccgttctggtacaagaagcgcctggcgctgggtatcgacctggccaactccaactgcaaggaggatagctaccgcttcgtggtcgacggacgggctccgtggtggaactgccagatcccgcgtaccgagtggtcgagcaaccccgcactgatcggtatgaacaaccccgatccgtcggatacggtcgaaaacgtcatcgaataactgcagtgtctaaccgaaaaaagagaacaacatgaaatattactgtaatttagcctacatgctggctgtggcgatactctcgctgggttttgcagcctgctcggacgatgatgattataagcctgcgccctctgttcccgaggattgcatgcaggtgtatttctccgaactcaatgagtccgaatacgaaatagctcccgaggatctgaccggcacgacgatcgacctcacggtgatgcgtttgcagaccgcccaggcggcttcggttcccgtcacggcatttcagacgggcgacctgttcgtagttccttcctccgtagaattcgccgcaggcgaggataccgcgacgttgtcgatcacgctcaacgaagctgcatccggagaattttcgctgcgcctggccatcgaggacgagcagtatgccgatccctacaaagtggtagaaggcagtccgttgttcggcatcaatgtggaggtcgtgaagtggaatttgctgggtacgggcgattatacctacaacagcgtgttctcgggtgtcgatcccgggctcgaactttaccagaaagaaggcactacgatgtataaaatcccgaactggggcggagacatcgaacttaacttcatttgtgacgaagagggtaacattaccgtccccgagcagtacatcggcgccgacgacagcaattacggcgccgtctacatcacctcgtcgaatgccgatgcctcgagctattacgatgcggctaccaaaacttactatttcaactgccgttatatcgtaagtgccggttcgttcggtacattctacgaaaagttcgaattgaagaaccctgtacaataggcaggcagaactctgcatcatgcggttcaccagaagccgctttagtggttaatactcatttctgggcccggaagtcgtgacgcttccgggtttttttatgtccgtaccgttcggtgcgagtctggatagcctctccccgcttgtttcaaattctcgatttgagattggaacgccttgccgaccgtgcgttttatcgctttatccgatactcgttcatgtaatgatattgccgtaaactctttactctcggactgcaattcgatcatctttgcccgttaggcagcttcgacttgccagcaataagacgttcgatttgcaaccgattaggacaattacgacgcggtttgtttttctcgaaatcccacaatgcaggattgaccgaaacaccgatactggaatatttcagtttacggtctttcgtgattcgtaacattagcggtgattcattgttagccaatactttggacttgtagcaaacgacctcgattgtggcctcatggtttaaacaacggtttaaacaacctgtttaaacgtgcataaaaccgctacggaaaggacaaaaagaaaaccacctacatcgctgtaagtggttgtttttcttcgtggtaccaccaggaatcgaaccggggacacaaggattttcagtcctttgctctaccaactgagctatggcaccatcccgataattgcggtcggaagtacttctttcccgtattatcgtggtgcaaaggtaaacaaaatttccaaacgtgcaaaatattctccgaatttttgcgcattattgcagttccaggctgatcctgggcacctacaaatgtcctgtactcctgcctgccgagtcctgtcggacaggggctgattgaaaatattgccgggggcttgccatttccatccttggctgctccgattccggaggtctggatcgataataaaccattttcattcgaccttacttgcggggcatccggagtctggatgccggttctggaaccgacccggcgggaacccaccggattaccgggcgtacccttgctcatcggtcgcaggggccgctccctgcccggcttgccttacaagttcctgcagcccggcctcgtattccgcaacggtttcgcggacgatccgtcccgccgtcggcagctcgcggatcagcgaggctgcctgcccgatttccagctcaccgtctgtcaggtcgccttcgaagatgccccgtttcgagcgtccgcgtcccagcagctgctgtaactcttcggccgtcgcacccctgttctccgcctcctcgaccgcacggtagaagccgttgcggatcaggcgtgtcggactgagcttcttcagcgcgagcatcgtgtcgccctcctgcagcccgatgcagagtttcttgaatgcgtcgctggccgaactctcttccgaaagcgcgaaccgcgttcccatctggatgccctcggcgcccagtgcgaaagccgccagcataccgcgcccggtggcgatgccgcccgcggcgatcagcggtatcgccacggcctgccgcacctggggtacgagcaccatcgtcgtcgtctcctcgcgtccgttgtggccgccggcctcgaagccctcggctaccacggcatcgacccctgcctgctggcttttcagggcgaacttcgtgctcgaaatcacgtgcgccaccttgcatcccgcttcgtgcaggcgggccgtccaggttttcgggctgcctgccgaagtgaataccgcgggcacgcgttcctccatgatgacgcccatgatctcttcggcgtagcggtacatcagcgggacgttcacgccgaacggtttttcggtcgccgcgcggcatttgcggatatgctcgcgcagcaggtcgggggtcatcgagccggagccgatcagccccagtccgcctgcttcgctcacggctgcggccagccgccagccgctgcaccagatcatgccgcccgcgacgatggggtagcgtatgccgaacagcgaagtgattctgttttccatggtttcaggtatttgtcgtcctgcaaaaataggcaaattatcgggagtgcaagctgcctgccacgggaaataacggccgtattccttggccggggctgaaaattttgccacctttgccctgcgttttacgaataaccgttcacaaccatgatatatacggaagatacccggatcgcggcgctggccgtgcatatcgtcgggaacaaggccaaggacgagcccctgctcgtctcccccgcattgtccgggcaggtcggcgacacgggcctgatgcagatcctgaccacctatttcgccggaggtttcaaatccgaggagtactacaacctccaccacgaaaccgacctggcctgcaacgaagtctataatttcgtctgcaaggtgttcgacgaccgggagacgttctacgacaactccgtgaaccttgcccggcacctttacgaggcgggtacccacccgcagatcaagggcggcgaattttacgtcgcctatttcaccggctgccgcttcgggggcgatgcggtcgatgccgtcgggcttttcaagtccgaaacccgcggtacgttcctcgatgtcggggagcaggacgggcagctgcatatcttctcctgccaggggatcgacgtcaacaaactggacaaggggtgcctcgtgttcgataccgagcgcgaagaaggcttcgccgtctgcgtcgtggacaacaccaaccgggcggaagcgcgttactggatcgacgatttcctgcatgtccgcccgcggcaggacaactatcacaacacgcacaacatcctggccatgtgcaagaaatacgtgaccaggcaccttcctgcggagttcgacgtgtcgaaggccgaccaggccgagatgctcaacgagacgatgaaatacttcagggagcaggacagtttttcgctcgacgacttttctgaaaaggtgatccgccagcccgaggtcatggagagcttcacacgctacaaacaggagtacgagcaggatcgcgagatccgtatcgaggatgagttcgccatttccgattccgccgtcaggaaacaggcgcgcgcctataagagcgtcatcaagctcgaccgcaatttccatatctatgtccacggcaaccgcaacctgctggagcagggcgaggacgaaaagggcaagttctacaaggtctattaccaggaggaggaataacctcctttcccgggcgggattgccgtgccggcaaggcggactgcaaggtgcagcccgctttttttgtgtattgtgccgaataaccggattttgaatccccttcacagggagcaaatagtcgcttattgtgtatatttgtatatgaagtggggattccgaaaggtacggcaggttgctgcgttatctcgcacggcctgtttttatggtccattataaccgggtgaaggccgggtcatcgtttgcaggatattccgggacgatgcgattatagtgcattcgggctgaaatcggcggattatccgtctcaggacttcagtggaagcggtatcatcctgccaactacttatttgtagttataaatcagggtataaatgcggtaatttgcactatgaaaaggcagcgacgaaatgacttttttgtcgggcaggttgctgacaggctggcgaaagccagacgaaggcgtaacctgattcaggaagtcgtgcgtttcgataccgggctgaatgtcggccggatcgaagccggatgttccgatatcacgctgtcgaccttggctgacctttgtgattattatgatatttcacccggggagttgtttcaggacatagtgacgcactcatcctgaagagggaaccggccatgcggccggttccctcattttatgtcctcatgtcccgagggttttctcgaatgccagccgttcgccgctccggtagcgtaccttcccgcaatagacgaaccccagccgcccgagcatacgcagcatgtaacggttgtcgaaattggtgtcgacgcgcatactgcccgtgccgcgcccgcacgccatcgcttcgacgcgccgcatgaactccgtcgccaccccgcggcctttctcgccgtcggccaccgccatgcggtgcagtacgacatagtccccgtcggtgagccaggccccttcgatggcgtcgtaggccggttccccgtcgaataccaccgcgccgtaggcgacgacgttgccctgggcttgggctgcggccgcttttgctgcctgcgtctcccgcatctcccgcgctttgcgtgtttcttccgtcgcttccgtcgcctcttccgtcgcctcttccgtcgtcgctgccgtttcgtcggcgccggatcccgttgcgccggcctcccccgtgtccgttattttccgcgcggcagccgtttccggacggaaacccgcagcccccgtgccgtcgcttccccgcgcttcggggctcttttccgcctccggtttctcgaagacccatccgtagccgcaagcgatgtcgtgtccgatatcggccgctgccggatagccgtcctgccattgcaggcttcccagtgcccgcatctgcgcctgcgcctgccggatgatctccatgatgcgcgccgcgtcggcggggcgggcgcgccggaacactaatttttcgtccatacggcaaatataggataaaatgccgtgatacgctactgcccgggggatatctgcgcggcggaatttccgccgtacggcttttttatccctccttccgcccgggcgggatgccttccgcagccttttttaccatgccccgtgcgaatccggcaaaaaaatccgggataaaatcgtacataataggcaaaaatcgtaactccagacccctggttgtgccctgcggacttttatcccgatgccccgtcctaaattcgttttcagcgggacagcccttctgcggggcctcccccgggatacccaccgaacctattttttaaccttaaaattagtgtgtatgagtttttctactaaccgtttttcccggaaagcactattacttgtgacagccgtgttctctgcgtcgttgctgtgggcgcaggccaccggcatctccggacgtgtgctcgatgagaccggtgcgccggtcatcggtgcgacggtcatggtcaaaggcaccacgatcgccacggcgaccaatgtcgacggcacctttaacctgaagaatacgggccgcaacgtcacgctcgtggtatcgtatgtcggctacgaggcgcaacaggtggcgtcgaagggtgccgggtcggtgacgatcacgctcaagcccgaggccatcggcatggagagcgtcgaaatcgtctccgtgggctacggtacccagaaacgcgaatcggtcgtgggggccatctccacgatccggcccgaggagctgcgcgtccccgtacggtcgctgagccagacgctggccggtaacctggcgggtgtggtcgcgttgcaaacctcgggcgagcccggcaaggacgacgcccagttctggatccgcggtatcgccacctttacgggcagtcccgatccgctgatcctggtcgacggtatcgagcgtcctctcaacgacgtcgacccgctggagatcgagtcgttcagcgtcctgaaagacgccagcgccacggccgtatacggcgtacgcggtgccaacggcgttatccttgtcaacacgcgccgcggtttcgacggcccggcccggatcgacctgcgttacgagcagggtttctcgttcgccagcaaacgcctgtcgttcgtcgacgccgctacccgctccgaaatgttcaacgaggcggtggatgccgtgaatgcctcggcggcactgaaatacggcgccgacgagatcaaggccatgcgcatgcagaccgaccccgaggtctatcccgatgtcgactggcagaagctccttatgaaaaaggtgtctctttcggagaaggtgagcgccaacatctcgggcggcggcaagttcgcccgctacttcacggccctctccttctacaaccaggaggggcagtatgccgtcaaacccggcaaatattcgtgggtgagcgacaagatcggccgttacggcgagaatgtcaactacaaacgctataacttccgctcgaacgtcgacatggacatcaccaagaccacggtggtgaatctgggcgtgcagggcaacgtgaccgagaacatggagcccgtcgagggatcggctgccatctaccgcgacatcatcaacgcggcgccgaacgctttccccgtccgcttcaaggacggcgaactggccggccgcgacggcctgaacaacccctataacatgctcacgcagcgcggttggaagaagaccaccggcaatacgcttcgcgccaacctgacgatcaaccaggatttctcgttcatcaccccgggcctttcggccaaggtgagctacgcctacgacgccgtgaattattcggtggaggagcgtgcgcgcaacatcaacttcttcgaggccacgggccgcgaccaggacggcgaactgatccgcaccgagtggcaggccgaccagaaacaggagtacctgaattacaaacagtccggcaacggttcccgtacgcagtacgtcgaggcggcgatcaattacagccggacgttcggcgaaaagcacgaggtcggcggcctgctgctcggcttcgccaaggattaccggttgcaggaggctacgagcgattacctcaagtcgctgcccaaccgttcgctcggccttgccggccgtcttacctatgcctacgacaagcgttacctgatcgaggccaacatcggtttcaacggttcggagaacttcgccaagggcaagcgcatgggcgtattccccgccgtggctatcggctgggtggcctccgaggagagcttcctgcgcaacagcgaggtgctgacgtggttcaagatccgtgcgtcggtcgggcaggtcggcaacgaccagatccccagtacgcgtttcatctacctggctacgatcaacagcggcgccaacggttacggtaacctcggcgtcaacttcgaccaaggggccggcggtatcggcgaaggtcgcatggccaatcaggacgtgacgtgggaggtgtcgaccaaatacaacgtcggtatcgaaaccgggtttttcaacgagttgaaaatcaatgccgacttcttctacgagcggcgtgaaaacatcttcctcgcaccccagttctcggagatttcggggcttcccaaggattataccaactacgccaacatgggtctgatggagaaccgcggcttcgaggtttcggccgaatacgtcaagcgtttcagcaaagacctcaccgtctccgtccgcggaaacttcacctttgcccgcaacaaggtgatcgacgacggcaagtactatgcctatccgtggcaggatcagcgcggcgtgcgttacggactgaccatgggctaccgtgccatgcacctcttctcgcaggaggagctggacaacatgcccgactactatacgcagttcggcctggacaagcagcagttgcgtgccggcgacatccgctacgaagacctcaacgacgacggcaagatcaccgaggccgacatgacgtggatcggcaaccccgcgatgccggagatcgtctacggtttcggtgcgtcgctcaactacaagggcttcgacttctcgttcctcttccagggcggaaccaaccgttcctcctacctgagcggcggctggtatttctacccgttccaggcagaccgcggcccgaagttcatgggtaacgtgatgaccatgttcaaggatcgctggacggtggacaaccccgatccgcacgccttctcgccccgcctctcctacggcgccgatgccaacaactacaagacttcgacctggtggcagcgcgacagcggctacctgcgcctgaagaatgtcgagatcggctatacgctgccctcggcctgggccagcaagctccggtgcagctcgctgcgcatctatgccacgggtgtgaacctgtttacggtcagcaaatttatctccgactactgggatcccgagacgggtgccgatgcctatcccatgcagcgccaggttttcgtcggtgtgaatttaaccttctaatacagcctaaagaatgaaaaagaatatcgtatatttaatgctcgcgtcgctccttttgtttaccggctgcgccaactatctggatcaggatcccgaagacctgaactcgatggacaagatcttctcgtccaagatcgagaccaccaagtggtacaaccgcatttacagcgacgatttcatggtgcaggagatgcattacagcggccagattccctatttctggtgcaccgacgaatcggcctacattctcgaatcgcacgtgcgcaatatcgccgaggggaagatgagccccgacaactactacggctatacgggctacaacctctatttcttcgtgcgttactaccaggccatccgccactgcaacctgttcctcgaaaacgtggacaagtgcgccgaactgggcgagatcgaccgccgcacgatgcgtgccgaagcccgcttcatgcgtgcctattaccactacctgctgctgcgcctctacggcccgatccccatcgtggagaccagccgttcggccgaccagatcggggcttcgcaggcgcgcaacacgctcggcgaatgcgtccgctggatcaacggcgagatcgactgggcctgtgaaaacggcatgcccgccgcccgcgacgagaaattcacgctggggctccccaccatcggtgccgcccgggccattcagtcgcgcatgctgctgatggtcgccagcccgctcttcaacggcaattcggcctacaagaactggacgaatcacgacggcacagtgctcatgccccagacctatgacaaggagctgtggaaggatgccgccgatgccgccaagacggtcatcgacatgaccgaataccagttgctcaaaccggccgcagacgctacgttcgatgagatcgtggataacctccgcgccgtgacgaccacctggggcgccggcaagaataccgagatcatctgggggcaccccaactcggtgcagtggtacggcatgtgcgccctgccggcgcgctggtacggctggaacggccgctattcgctggccatcggcatgatcaacgatttcttcatggccgacggcagcccgagccgcccgctcgaagagtggttcgcctccaagaagttctcggccgaagccggcaacggcaccatcgccaatacgttctggatgttcgtcgaccgcgagccgcggttctatgcctcggttcacttccccaaccagcgcctgtcgtacgcctatgagaacaagaccgacagctaccaggatgccgacggttacggcgtggtcgatttctggtactcggggctgagcggcaacggcagcaccccgggcgacaagaacacctcgggattctccgtgcgcaagaacctcccgctggattaccgcagcaacaagcagaccagcgaggcgacgcgtatgctcaacgtgcctttccccatcatccgcctgggtgaggtctacctcaattacgccgaggccctgaacgagtactacggcacctcccggcaggacgaagcgctctattacctcaacgaaatccgcacccgtgccggcatcccggcctacgagggcagctattcgcaggacgagatgcgcgagatgatccgccacgagcgcaagatcgagctggcgtgggagtgcaaccgctatttcgacgtgcgccgctggttcacggcccatggccccgacggcgagttcaaccacgacgaatacgggctggacatgtcgcgcggtacgggtgccaccgacccggcgttcttcaccctgaccaaggtggccaacaagcgcttcgacatccagcactacttcctgcccatcaagtcgtcggaggtcatgctcaacacgcagctggtgcaggcgccctactattgatggccgcagccggacacatgttaaacttaaaaatggaaaattcgctatgaaacagttttttaagatactggcgctcgcggccctggcgctgcctttcaccggctgcgacgtggagtattcggacataaatattctgcccgacccggtttttgaacagaacgggctgtacacggtcaataccatatccatctatgacgactacgaaaccgtcatcaatgtttcgagaactgccggtctgtcgaaagaactggaattggatatcgtggtggacgaaacgctgctcgccgaatacaacgaattgtacaacaccgactataaactgctggaagcacagttctacgacattccgaagaatgcgcaacttgcaagtacggtcaagtccgtcgatatttccgtgcggatacatcccaaagccctgattgcggccaaaggcatggctgcggctaacaacatgctgctccccatccgtatttccaatgcctccacgcccgtcgaggacggcggttcgatgatgcaggcgctgttgcgtttgagcatcgtcgagccgattgtgcaggtggagatgcccgaacagatgccgcagctggagttcattccgaccattccgctgccgcaggaaattacgctgaacgccacggccaatttcaacacgctggaggtggcgaaaatcggctatcgggtcaatgcatcgaaagtcgatgcctataacgaggagcacggcacctcttaccagctgttgcccgagcagtattataaaatcaaggaatcggatttcgatacggaaacgctggaaatcgagagccgcatcgaattcgattgcgctgcaatcggcggtgagggcacctacctgctgccgctcgaaatgcattccgacgactattcggtcgtccagcgggagccggtttatgtcttgattcagatgtccgaactcaaaatatgggtaacgaacgtcgctgacctcgcaaaaacgtcgggcaagggaaaaatcagggtacagatgaactccccgatgactgtcggccagcctgtcgacttcgtattcgaaccggagaaggtcgaaacctacaacacggagcacgggactgcattcaagacgctggatgccgccaaggtggtcgttaccccgactgaaattcaggccggcagccaatacggcgaactctcgttcgagctcgatctgtcggaattggattacgacggcgccgataaatacatggttccgttgaccttcaagagcagcgaactggtggacggcacgatcgtaacgggcccgtcgacattctacatcgaggtgaacaagacgctcaagggcacctacgacaaggaagtatggggcgaagaaaaaagcaaccgcgttctgaaaccggctattttcatcgcaggacaggacggctatgctgagtcgcggaatgcgaagaagcagaagtacatcatcaattacaaccagacgtggacaggcggcctgatttacttcaatatttcggacgaaacggtcgcaggacatcccaatcggcgggtactcgtcgatttctcggatcgtcccaacgaaagagctgacggttatgaccagattgtcgattccggcagttatctggacactgacacgggggatatttatttcaacctccgggttatggacggtgcgtacggcgcgacgggcggattcggtatcgaagtggtactgtccaatcgtgcagacctttgacggtctggcagggccgatggccgggggtacacagggtatcccccggccatcggcaaccgctgccctgctgacagggggctgctccggcctgtaacctttccggcacagatcgccgcgctgaaaaccctgaaatgattgaattttaaatataccggttatgaaaaaaatgcgattctttttgtgcgtagtcctgtcggccgcggcgctttggtcatgcggcggcgacggtgacggcgagcccgggcccgaacctcccgtgccgcccgtcgtggatcccaatgccgtcgaggtcgtcaacagcggcttcgaaaaggggctcgaaggctggacgcgcgtcgatttccacaacggcggcaaggtgacggtcgaggtggtcgagggtgccggcgtcaacgacagccgctgcatcaagatccagcagttccccgagaacggccgttgcggcgtgggcatcaaacagaagctcacggggctggaacccgaccagatgtaccgcatgtacgccaaggtcaagtattcggacatcccgcaggacgaagggcgcggcgccatcctgttcgacatgtcccagaagcagttctggggcgcctcgaaattcctctacggcactaacctcaggaactggacgtcgctccatttcgacttcctttcgcaggacgacgggactgccgagatcgtctgcgcgctggggttccgctacggcgggacgaccaacggcggctattcgaccggcacggcctacttcgacaacgtgagcgtggtgaaggtcaccgacgaacttttcatgcaggaaggcgagcatatccgcctcttcgtcgaaccctcgcaggtctacgcctcggcgtcgcagatcaccgagtggatcgccaacctggacaggatgtacgagtcgtatgccgacctggtgggggcgaccccgcacgaggggcgcaagctggcgatcctttcgtcgcgcgggctcgaaagcggttattgggcgctggcgggctatcccatcctgtggagcagcaactattcggccgtcacctcgaccttcgaggagctggcgcagcacggcacctggagcttcggcctgatgcacgaactggggcacgtcttcaacctgggcaattcgagctggaactggaacgacgagatgttcgccaatttccggatgcagtacggcctggaacagaaccagggcaaggtctggatggacgaacgggtctacaccgggcgcgagatcctcgacatgtacaagaaggattacgacaatacggtctacacgcaggtcaacgacaacggcatccattacatgctcggacgcctggccggcccgggcggcatcggctgggaacccttcaaggccgctttccgcgaactgacgaccacgggcggggcaccctcgggcaaatacgacaagttcgaatacctgctttcgctcctttccaagcacgctacccggctgaccgggcgcgatgtggatgtcaagacgcagtattttaccgaggccgagctggcttcgatccgcaaacagttgcaataataaccgccgtatcccgtcgcggggcgatgcgtcgcctctgccgggcggcaattaatacccaatgcgaaaaatgaagagagtggtatttctactcgccgccatcgcggcgtgcgtgctgtgcctgtgcgccttcggttcgaaggtcaaggtattctccgacaatttcgaccggcccgaaaggttcgcgcgctactggaaccataatgccggggaggtgcccggcacggtcgaatacctgcccggcggcggtgccgacggcggcggatgcgtgaagatcgccagcgccgaaaagaccgccctggccatcaaacacaaacttacggggctgcatcccggcaagctctaccgcctgagtgcgctgatgaagtgcgacagcgtgcaggacggccgcggcgccgtgctctacctcgaccccgaggggctggaacagtcgtggaatgcctcggagttcgcctacggcaccaacgactggacggaagtgtatatggatttcgtgcccgaccggcagggcgaagccgtcgtctgctgcggcctgggattcccctggggcacctacaacggaggcaaagcctcggggacggtgtggtacgacaacgtgaaggtcacaccggcgcccgaagaggccctctatacccgcgagggcgaacacatcgtgctgaaactcgaccgcgacaaggtgaccgtctccgatgccgacatcgacgcctggctctcgaagctcgaccgcacgtacgaggcttaccgcgacctggtgggtgacgtgcccttcgacgggcgcaaaatcatgatcctcaacacgccgggcatcgaacccggttactgggcgctggccggcaacccgatcctgtggaacagccacgtcgccgtatcgaagctgctcgaccgcacggtcgagttcggcgactggggcttcggcatcatccacgagatcggccatgtcttctcgcagggaaacatttcgggtacgggacgctggaactggaacgacgagattttcgccaatttccgcatgtcctatgccctcgaagcgtgcgacggtacgatgtcgcagcgcgacatctgctaccggggtgccgacgtaatcaactactacaagattttctacgacgaaaccatcggcgccggcatccccaagaacaacggcgatgccctgcattacaccttcctgcgcatcaaggagcgttacgggtgggacgtctacaaaaaggcgttccgcgaactctacgcgctcggcgactcggggcaggaagggctcgagacgccctacgacaaattcctcttcttcctctcctacgtttcgaaggccgcgggcgaagatgtcgtggcggcgacctatacgcccggggaactggccctgatcgaggaatcgcttagaaactgatgccgatgaataccttgcgaacagccctcctggccctggtcgtggccgccgcgttccgcgctgccgcacaaccggtctataccttccgcgtcaaggtcggcatcgaccgcgaatcggtcgattcgctgggcgggcgcgaccgggtcgtgcaactgaccgaagatatgttccggcgcgtcaatcgtgctttcaactacggggcgcagctgcgtgcggtctacgatttcgtggtggactgggacgccttctacatctacgacggcgtgtcggccgaccagatccgcaagccccatcccgaccacgattatctggtggtgatggacggttacaaatccgatccccgcgagacgggcggcggctggtacggcgacgggatccaggccatctaccattcgcgcacgcacaacgaccgtttcaacagcccgttcgagaagaacgccatcgacggcatcatccacgagttcggccatgcgcggggcgtccccgacatctatgccatgaaggtcgacgcggacaagaaccccgtcaacggacaggcgttttccggcgtgcggtgcatcatgaattatccctatggcgaggagctctggagcgactatgccgtccgcatgatcaaccatgccgccgaccgcaatgtcgacatcgacgacctggtggcgggcgtgttgcccgaccgtatccgggtcgaggtggcggatgccgacgcaagcccggccaaaggggctgtcgtgcggttctatcccgtgcgatggtacacctatacggtgaccgccgagccgcaggccgaggccgcgaccgaccgccgcggacgctgtacggttcccgttgcgcgaattttcgaacccgagcaggagttcggcgtgcgctattgcaactgcctggtcgaagcggaatacgacggcgtgaaagcctatggctggctgccgctttacgagttgcagaacgcccgttttgccggtcagcgggagcatacgctccgcttgcggctcaaacgcggctgcgggctggttcgcgccgtaggaattgacgaataattgctatctttagggctcttaatcacaaaacaccgaactatgacaggaagaaccttactgacttgcattttcatgctgtccgcagttgccgtatgcggacaacgctggcagatcgcccccgacgggcggggcatcgtgtggaaggtcggcagcgacatcccgcacgacgaccacatcgagatgagcggcgagcgaatggccttcgtgctccgctggggcgtcgactcgcgcggggcgttccgccaggagcgttcgctcgtcttccccctgctgcgcaccctgcccaacaacacccacgccagcctgatgtaccgcatggccgcggacatcccttcgctgctgggcgtggacggcctggccttgcaggacgaacgggtcgggcaggtggccatcgacggtgcgctggaggtgcggagccgctggggcgttggcaagatgaacgtcggttcggcgcgggacatgaaacccgagcccgtcgtggagatgacgcgtacgatcttcccttcgcgcacgctgccgctcatgtgcgagcgctacacgctgcgtaacgtcggggcgaagccgctgacggtttccgtacccgaattctcgcaggtcgtgacgaccgatccggccaagggcgtcacgggcagctatgtcgtgcggggcgacatcgcgggcagcggcacctttacgcttgccgcgggggactcgctcgcgttcgacgccgtgttccaggcctacccgggcggcggagagcctctgcaccccgacgtggcggccgagttggccgcccggatggcgttcgtcagggagtgcatcgacgcgaacctcgtgctcgaaacccccgacccggtgatcgacacccaattccgctatgccaagctgcgggctgccgagagcatcgttgcgaccaagggcggctacatgcacgcccccggcggcgaatcctactatgcggccatctgggccaacgaccaggccgaatacgtcaaccccttcttccccttcctgggctacggggtgggcaatgcctcggcgctcaactcgttccgccatttcgcccgcttcatgaaccccgcatacgaaccgctgcccagctcggtcatcgccgagggcgacgacatctggaacggcgcgggcgaccgcggcgacgccgcgatgatcgcctgcggggcggcacgctacgcccttgcgcgcggtgaccgtgccgaggccgccgagctgtggccgctcgtcgagtggtgcctcgaatactgccgccgccagcttacgcccgacggcgtcgtggcttccgacaccgacgaactggaggggcgtttccccaccggcgatgccaacctctgcacctcgacgctctattacgatgcactgctgtcggccgtgtcgctcggccgcgagctgggcgtggaatccgcccagaccgcccgctatgccgcacaggccagggcgctcgcccgagctatcgacgcgtacttcggcggcgaggtcggcgggtacgacacctaccgctactatgcgggcaatacgctgctgcgctcgtggatctgcatgccgctgatcgtggggctgaaggagcgcagcgaaggcaccgtccgggcgttgctcggccccgagctgatgaccgacgacggcctgctgacccagcagggcagctcgacgttctgggatcgctcgacgctctacgccctgcgcgggatctacaacgtggggcaggccgaccgtgcgaccgaactgctgcaccgctattcgcagcggcgcctgctgggcgaccatgtgccttatcccatcgaggcgtggcccgaaggctcgcagcgccacctttcggccgagagcgggctctactgccgcatcatcaccgagggcctgttcggcatccgccccacggggctgcggtcgttcgacctcacgccttccatgcccgctgcctgggagagcatgtccctgcgccatatccgggcgttcggctccgatttcgacatcacggtcgcgcgcgtggcggacggcaggctccgcattacggtggcccggcccggcgcaaaaccgaaaatataccgcgcggcacccggcgcgacgatacgggtgaaactaaccgattaacaatccgatttacctatgaaccttttccgctgctttgccatttcgtttgcattgtccttcgcggccgcctgctcgtccggccccgggactgatttcaaagtcgcctcgcccgacgggacgctctgcgtcgggatccgtgcggccgactcgctgacctataccgtgacccgccacggtacgcccgtgctgctgccttcggccatcgggctgcacttcgccgacggtacggtgctgggacgcggtgcgaaggtgaccgatgcgcggcgcgaaacggtggaacgggtcgtcgaggctcccttctaccggcaggcacgcttcacggagcattacaaccagctgaggcttaccttcgaaggcggttatgccgtgactttccgggtcttcgaccagggttgcgcctaccgtatcgaaacgcatctgccgggcgaacgaaccgtggccggtgaagtggccgagttcaatttcgcgggcgaccccgggttgttcgccgcctattccgacggcctgtgcaacgcctaccagagccagtatgagaagtgccgcctgaacgcgctggggacggaaaaacccgtcctgctgccgctggccgccgactgcggcgccgccggccgcgtgttggtctgcgaagccgatctggaagcctatcccggcatgttcctgacgccctcggcgggcggcctgcgggggctgtttgccgccgtgcccgacagttgctaccttcacgagcgccgctgccaggagaaggtcgccacgcgccacgactatatcgcccgcgtcgagggcacgcggacatatccgtggcgtatcctcgccgtggccgacgaagaccgcgaactcccgaccaacgacttggtctatgccctcgccgcagagaaccgtatcggcgactgctcgtgggtgaagcccggcaaggtggcctgggagtggtggaacgactgggggctgacgggcgtggacttcgagccgggtatcaacacgcgaacctataaggcctatatcgacttcgcggccgactacgggctcgaatacgtcgtgttggacgaagggtggtcggatccgaaggccggcgacgtgatgtccgtggtcgagcagatcgacctgcccgaactggtgcgttatgccgacgccaaaggtgtcgggctgatgctgtgggtcgtgggcaacgtgctcgacgccaagctcgaagaggcgtgcagctactatgccggattaggtatccgcggcttcaaggtcgactttatcgaccgcgacgaccagaaggccgtcgagctggtctaccgccttgcccgggtcgccgccgcgcaccgcctggtgctcgatatccacggcgtttacaaacccacgggtcagaaccgcacctatcccaatatcatcaatttcgaaagcgtcttcgggctggaggaactcaagtggagcaatcccgacatgccgctctacgacgtgaccttccccttcatccgtatggtgcagggcccggtggactatacccccggcgcctaccgcaatgccacgcgcgaaggcttccggatcgactaccgcaacccgatgagccagggcacgcgggcgcaccaggtggcggcttacgtggtcttcgacgcaccgctggtgatgctctgcgactctccgacgcgctacatggccgacgaggcctacacgcgcttcatcgcttcgctgcccgtcgtgttcgatacgacgcgggtgctcgcgggcgaaatcggcgaatatatcgtcacggcacgcaaacggcaggattgctggtatgtgggcgggcttaccggctggacgccgcgcacgctcgatgtcgacctgtcgctgctcgaccccgggcgggagtatacggccacgctgctcgccgacgacggccgctcggctgcggagcccgcccgctatgcgctctccacgcaacgggtgacctccgcgacacggctgcaaatacccgtggcgcccggcggcggcttcgcgctgaagatcgaaccggctgataacaaataactctatccgaaaaatacgacccttatgaaccgaaccctgagaaaatgctgcgccgccctgctggccatcctggccgtatatgcggcacctgcggcggaaaaaaccgtctacctgaaagatttccttgcgcccggcgctgccgggacggatgccgtgcccgccgtgcgggccgcgctggaacactgtgccgaggtcggcgcctcgcggctcgtgctgcccggcggccagctccgcatgcgtcccgaccgggcggtcgaaaagtaccagttcatcagcaacaacgacgagagcctcaagcgcattgcgttcgacctggtgggtatgcgcgacttcgagatcgacggcaacggcaccgaactgctcttcacgggcttcatctcgccgttcagcctcgaagactgtgagaacattacggtgcgcgacctgacgatcgacttcacccgtacgttcaattccgagggcaccgttgtggcgaagggcgacggttggctggaaatcgagttccccgaagattacctctgcgacatcgtcaacggctgcctgcgtttccgcgatgccgagggtacggtgtaccccttctccaacctgctggagttcgacgccgtgcggcgcgaaccggcgttccgtgccacggactactggctgtcgaaccggacgatcccggccgaaaaatgcgccaacggcaacatccgcatcctgcgcaaagacctgaccgccacggtcggcaacgtgatggtattcggcgcggctgcgcgttacaaccccggtttcacgctcgccgactgccggggcgttgccatccgcgacgtcaacctctaccactgcggcggcatgggtgtgatcgcgcagcgcagccgcgacatcgagcttcgcaagctggtgatcgtcccctcgcccggcaagggacgcatgatcagcattacggccgatgccacgcactacgtcaactgcggcggctacatccgcatgatcgactgcacgttcgagaaccagaaggacgacgcgacgaatatccacgggctgtacatggccgtcgaaaaggtcgggggcgccgacaaactgctgctccgctggcgcaactcggggcagtacggcgtggatttcatcgtgccggggatgaccctcgaactggtcgacaacaacaacgtggagacctatgcccgccggacggtgaagtccgtcaggcgcctcaacaaggtttacaccgaagtcaccttcaccgagccgctccccgacggggtcgagcccatgcatgtcgtggcggccgacgatgaatatcccgaggtgctcatcaagggctgccgcatgcgcggcaaccgggcgcgcggcctgctgctgggctcgcgcaaccgcatggtcatcgaggataactacttccacatcgccggggcggccatcctgatcgaaggcgacgccaactactggtacgagcagtcgggcgtgcgcgacgtggtgatccgccgcaacctcttcgagaacggcaactacggcagtcccggttggggctcggcatgtattgccgtgggcagcggcatccccgaccgcgagaccagccgctaccaccgcaacatccgggtcgagggcaataccttccgcgtgttcgacccgcgtatcgtcaacctctactgtgtcgacgggttcgtgttcacgcgcgacaacgtcatcgaatacaccgacgattatccctatgtactcgacgaaaagcgcaatttcatcacgcggaattgcgaccgcgtggtcgtcgataagaaacagaccgataaaaaataaacgactttttccgatgaaacggctcttttccgtcgtgctggcgctattgctggccgtgcagctcccggcgcgggtgaaactccccgccgtgctggggagcaatatggtgttgcaacgcaatgccgaagtgaatttctggggcgaagcatcgccacgcagccgggtacgggtcactgcctcgtgggacggccgcacgcatgaaacccgggccgatgcctcgggccgctgggcgctgaagctccccacgggcgaagccggaggcccctataccgtgaccctcagcgacggcgaaccgctcgtgctcgacaatgtcctcgtgggcgaggtgtgggtctgctcgggacagtccaacatggagatgcccgtgagcggattcatgttccaacccgtcgaaggggcggtcgatgccatcgccgatgcgggcatgtaccccggcattcggatgttcaccgtccccagggtctcgtccaagacgcccctggacgattgcgatgcggcctggcagaccgcgacgcccgcctccgtcggccagttcagcgccgtgggctattttttcgggcgtatgctctacaaggcgctgggcattccggtcgggctcatcacctccaactggggcggttcgaccatcgaggcgtggatgaccgtcgaggccatcgacgcgacgccgggcatcgaccacgccgttgccaagtcgggaacctacgacaacagcattccccagcggctctacaacggaatgatcctgcccgtctgccgctatacggccaaagggttcatctggtaccagggcgagtcgaaccgcaagaactggtacgattacaaggcattgcaggtctcgctcgtcaaactctggcgggaaacctggggcgacgggaagatgccgttctactatacgcagctggcgccttaccgctacgagggcgacgagctgcgttcgctgccgctggtgatcgaggcgcagtaccgggcgctggccgaaatcccgcactcggggatcgccgccacgaccgacctgggcaacccgacctgcatccatccggcgcgcaagcgcgaagtgggggagcggctggcgttcctcgccctggcgaacgattacggggtgacggggctgcccgccccggcgccggtatacaagtcgatggagcgcgacggcaataaactggtgttgactttcgacaacctgcccgtccgggcccaaaacggcgtcgacagcttcgtggccttcggcccggacggctatcttcgtccgggcggcttcgagattgcgggcgaagaccgggttttccaccctgccgttgcgaatttcaaatattgggacaaccggatcgaagtgagctccgaccgggtgtccgacccggtggcggtgcgctacgccttccgcaattactgccccgaagccaatgtcatgacgacgatggggcagccccttgttccgttccgcaccgacgactggccgctggacgacatcggtcagatcaggtaaacatccggcggccatgcatcccgaattcccccccccctcccggctgatttccgggtactccccgttgtttgcggggatagcgccccttatcctgcgcctgcattgcggacggcatcggccgtccgcccgggggcgtcatgtcttcggggcggggcggcggactgcggcgcgtaggggcggtgccccgacggataatgccttccgcttcggagccggacggcgcatttctgctgcccgaaataggtataatgatgccttgtatttgtatatattaaggaaagaaagtatttttcccatcggatgcttccgccccgggaaaggttgcgtcggttttacgggatggaatgataaagattataaagttctctaaagggtcggcgctatggaatcgagggtgaaatgtgcggtatgtgcggtcgctatgtgtctggtgttgcgtgccgggagcggtatggagcacaaattcaggtattataccgacaacagcgggttgtcgtcgaacaccatccagtgcctctatcaggatgacaaggggtatgtctgggtcggcacggccgacggcctcgaccggttcaactcctacgatttcaccaactaccgctccgattaccgccgccgcaatacgctcgaaaacaactgtatttacagtctttgcggcgaagggttccccaacggcgaccgcatatgggtcggaaccagcgacggggtctatatcttcgactcgaaggacgagtcgttcgtccacctgcccatcctgggcagcgatggccgggagcgccgcaacctgctggtctattcgcttgcggcggacgtcgcgggcaacatgtggatcgggacgctcggcgacggcctctaccgttacagcctcaagagcggcacgttcgaacactataacgccgcgaaataccccgaggccttctcgtccgacgtcatcgtgaagatcctgctcgaccacgacaacaacatctgggtggcttcgggcggcggttcgctgctgagccgctacaaccccgagaacaaccgtttctccaccttccgggtcgaggacacgctcacgcgcgagccgatttcgcgcatcagtaccatgtgccaggattcgttcggcgacatctggatcgcagggtatgcctgcgagctctacaagttcgaactttcgcggctgacgttcacctgcaaccgcccggaggacggcgaggcgtacggccgcgtgcggagcatgatcgaatacgccccggggataatcatgctcgggacggatcacggcctggtgaatttcaataccaagaaccgcagtttcgagcatgtcgacaacggcacgaccaaccggaacggacggctcaacgacaaattcatccactccatcctcaaggatcgtgacggcggcgtgtggatcggaacctatttcggcggcatcaactacctctcgccgctcagttcgcttttcacgctcatcgaggccggcgaggggtgcgggcatatcatcagcaaattctgcgaggatcccgaggggaatatctggatcggcagcgacgacggggggctgagcctttacaatccgcgtacgggcagctatacgcccgtggcggtcgacccgcgcgaccgggcgctcaacatccatgcgctcaccatcgacggcggatggctgtgggtcgggacgtatggcgacgggctttaccgcatcgacctgcgcacgcggcagatgaagcacttcacgcaggccggcacgggactcgacaatctcgacgtctattcggttttccgcgattcgcgggggcagttgtggatcggcaccaaaatgggcatctgccgttacgacgacgtttcgcagaccatcacgtgcgcattcggcctgggacataacagcgacgtggtggacatctgcgaggatgcccgcgggcacctgtggttcgcgtcgctgggcaaggggttgatccgctacgggttcgacgacggccggttcgccctctgttcgcacgattccgggggcgggctttccgatttcgtgagctgcctggccgtcgagggggacaacctgtggatcggcacccacggctgcgggctttgccgttacgacatcgcggccgacacgctctccagggagttcgacatgctgccctacggcaactgcgccgtgttccagatcgtgcagaacggcggcgaactgtggctcacgaccaaccgcgggctgctgaaatacagccccgggaacggcccgcagtcgatctacaagttcacctccgacgacggactgctggccaatatcttcaatgccaattcgggcatcaagtcctcgaccgggcatatctacatcggctgcaacaacggcatcaacaagttctatccctatgatttcacgcgccgcgagaattcggccaaactcagcgtcgtcttccccgatttcaagctcttcaaccgcagcgtgcccgtggacggacgactgctgtccaataccatcgactgccagcgctcggtgcgcctgcgcggacggaagatgtcgttcagcctcgatttcattgcgctcaacttctcctcgccgctgaggacggtctaccgttaccggctggagaatttcgacgacaaatggatcaccaccggtctggacgaaggggccggggtgcagcatgtctcctacaccaatctgccgccgaaccgttaccgcttcgtcgtgagcgcctcgaccggcggcgagcagttcggcgaggaggccgtggtcgagatcctcgtgctgccgccgtggtggatggctcgcgccatggtcgtggcctacggcgtgctggctctgctggccgtggcgggcggcggcctgtggctgcgccgcaggattggccgcgcgcaccgcgagcagatcgcctcgatcacccgcaagaacaagctcgacctgctcgaggccaaggtcagcctcttcacggaggtggccaacgaaatacgtacgcccgtcgcgctgattgccgcgcccgtcgaggagatcgccaagcgcgccggggatttgcccgggctccgcgacgacgtggacatcatccgcaagaactgcgagcggctgcggacgctggtcgaccagatcctgaacctgaaaagcgcggaggagggcgagcatgccgcctcctgcgttccggagcgcgtcgacgtacgggaagtattgcggacggtggtcgcggcggtgggggatgccgtcccgcggcggggtatcgcggtgcacctcgggctgcccggcgaagccctcacggccgagatgtgctgcgaccacttctcgaagatcgtgggccagatactcggtaatgcctaccagttcgccgagagccgcatcgacgtgacgctcgaaggccccggcggggaggtgcccggcgatgtgttccgggtacgtgtccgcgacgacggcgcggggatagaccgggcggagaaggcacggatattcgaacctttctatacgtccgacaagtgtgtctccggcagcgggctggggctggggctcgccgtggcgaagagcctggcgacccggatgggcgccgtgctcggggtcgaaagtgccgtggggcagtggacggagtttacggtgacggttccgctcggtgcaccccgtcccgtccccgggtcggatggcgattccggagtgcctgccgggcagccggccgtggcggccgtgcagcccgaggtgcagaagcggctgcccgacatcctgctggccgaggataatgccgacttcgcggactttttcgtgcggcatctctccggcagctatacgatccattgtgcgacggacgggcggcaggcgctcgacctgctccgaagccggagcatcgcggccgtcgtgagcgacgtggcgatgaaagggatggacggcgtggcgctctgcgcggcgatccgcaacgacccggcgctggatcacctccccgtggtgctggtttcggtggactcctcttcggcggcgaaggtgcgtgcgctggaggcgggtgccgacgcctacctcgaaaagccgttgtcggtggactacctcgactgccagatacgggcgcttgtcggcatccgcggccggctgcgcctgaaattctcgaagatgccctacctggtcatggacggggatgcggcgagcccttcgggcaaccgtttcatggcgcaggtgaaccagtatgtcatggataacatctccaattcgaatctttcggtcgaggacatcgccgcagccgtgaatgtcagccgtacgctctttttctcgcgcatcaagtcgctgacgggcactacgcccaacgagttcctgcgttccacgcgcctcagggtggccgccgagctgctttccaaacccaacgacctgcgcgtcacggagatatgctatatggtgggcttcacttcgacctcctatttcgccaagtgcttccatgcgcagttcgggatgctgcccaccgaattcatggagaaataccgccgggagtgatcctgatgttacggttgttttcgcggggcgcagtgcgtacgcccggggcaggcgcctgctgcctgcaagggttcggggcgtgaaacggcaatcccggcctgcatctattcaaatgcgggccgggattgttcgcgtttctccatttaccgcctcatcccgtagccgatgcgcagcagtacgagcaggagcagcgtcacggccagttcggccgccggtaccgcgagccagatccccgcgacgcccgccagccgcggcagcacgaggaagcagaaagccatcagcacgatgccccgaagtacggtgagccccgtcgcaagccgtccccgctcgatgctctggtagtagccgatcgtgacgacgttgattccgaaaaagggatacccggcggcgaagagcggcaggccgcgcacggcgattgcataggccggggcgtcgggcgtcaggaacagccccacgatccacgggctgaacagccatgtgaacccgaataccgccagcccgcaggcgaacgccgagccgagggccatcctgaacgcatccctgccgcgccgcatcaaccctgcgccgtagttgtagctgatgatcggctgtgccgactggatgatgccgttgtagaccatgaagatgatcgggaagatatagcaggcgatgctgtacgccgccacgccgtccttgccgatgtagcggatgaacgtatagttgcccacgatcatcaggcacgagatcgccagttcgctcagcagcgccgggaacccgatgtaggtcatgtagcccaggttgcgggccgtgaggcgcaggctcttgtagctggttttgagcttcacgaaatgcagcgtgcggctgctgcgcagcatgtaccgcagcatcacgcccgagcctacgatatagccgatgcccgttgcgatggccgcgcctgcgagcccccacccgaattcgaagatgaagaggtagtcgagtacgatgtttatgcaggccgccatgatgttgcacgccatggcgaaccggggcgcgccgtcgagccgcacgatgaacatcaggatgttgaagacggccagcggcgcgaggaagagcgtgaaccacacgaggtattcgcgcgcgggaaccatcagctcgggcggcgtgcccaacagcagcagcaacggtttgtggcaatggatcagcagggcgctgagcagcgcgatcagcagggccggtatgaccagcgactgcgtgatgttgatctgggccacgcggcgtttgccctgtgccaggttcaccgacgccaccaccgagccgcccatgccgaacatcagcccgagccccgtgccgagcgtgaagagcggggcggtgaggttgactgccgccagtgcgtcgctgccgatgccgcggcctacgaatatcccgtcggtgatgacgaacaccgccgagaagaccatccccatgaccgtggggaaaagaaagcggcggaagagtttgccgaccgccgtgcctttgtaatcgatactgtcgcgtaacatagttgcacctcttttttttgaggtggtgcaaaagtaaggcattctgcgccgggaaaagttatcttatggtaatttccgtgtcatttgaccccggcgcggatgcggctcaggctttggggcgtgagaaagaggtaggccgcgaggtctttcagggcgatgcgctgcatcagctggggatatttgcgcaacatgaggccgtactgttcgcgtttgtcgcgccaggcatagtcggcgaaatagtcctcgtggcggcgcaactgctcctcggccatgcgccgtccccagtcggccagctcgacattcccggcgaagagggcgtccatgcgggcacgcgggatgcgtaccagggtcgtgggctccatcgtttcgatcgtctggcgcgatagcccgccgggctgtgtgccgagtgtcgccgttgcagggtcgccttcgaacgagaaggagacgatgacgcatttgtcctcgcgcatgacatacgtgcgcaccgaaccctcggccacgaagcagacgtccgggtcgcgctgcccctcctcgatgatgacctccttgcgggcgtgttgcgtcagcgtggcggattgcatgagcagacccgtgccctcgtccgagagtgcgtagcgttcggtcaatatccgtgcgaaatccatgcggcaaaggtacgcttttttcggcaattgcgaaaaagccgcctgttccgttgctggcggaagatttttttgccggtttgtcatgtcggaattacagggtttgtgacaatttatgacattttttcattttcatgcggctggcacaggatttgaccttttacgggtgaaaccgctccggaaggggcagcgaaagaaaacaaagttaaaccaaaataaaacaaggaggacaagattatgacacctgcaagaacgaatcagaactggctgccgagcattttcaacgaatttctggataacaactggctcgccgagcgccgcaacgccacggctcctgccgtcaacatcatcgaagacgaagacgagtacaaagtggaggtcgccgctccgggcatgacccgtgaggatttcaaagtccacatcaacgaggacaacgagctgatcatctccctggagaagaaatccgaggagaaggaggaagacaagaaacgcaagggtacctacctgcgccgcgaattttcctatacgcagttccagcagagcctgctgctgcccgacaacatcgagcgcgagaaaatttcggccaaggtcgaaaacggcgtgatgaccatcgacatccccaagaagaaggtcgaggaactcgccgccgccacgcgccagatcgaagtgaaatagaggcatgcatagcccaagtgggagggggagtaccgtcaacgggtactcctttttttgtggcatatcccggcataataataacccttttatacataaaaacggccacaggcggacaagacatccataaatccgctatctttggggtgcatacgcgacagcagactaaaccaacgtacatgaaagtaggattgttcataccctgttatatcaacgccgtctaccccggggtggggcgtgcgtcgtacgaattgctcgggcggctgggctgcgaggtggattatcccctcggacagacctgctgcgggcagccgatggccaatgccgggttcgagaaggacgcccgggcgctggcagaacacatggatgcgctttttgcgcagtacgactacgtggtcgggccttcggccagctgcgtggttttcgtgcgcgagggctatccgcggttgttggacaattaccgcgagcatgcctgcgtcgattcgcgtatctgggagatctgcgagttcatccacgacgtggtgaagcccgcgaagctggatgcacgtttcccgcaccgggtgagcgtgcacaactcctgccacggggtgcgcaaaatggggctgtcatcgcccagcgagctgaacgtgccctatatgtcgaagctgcgcgacctgctctcgctggtcgggggcatcgacatcgccgagccgtcgcgccgcgacgaatgctgtggtttcggcggcatgttctccgtcgaggagaacgccgtgtcggtctgcatggggcgcgacaaggtgcgcgaccacatggctacgggtgccgaatacattacgggcgccgactcttcgtgcctgatgcacatgcagggggttatcgaccacgacaaactcccgatccgcaccatccatgccgttgaaatcctcaattcgaagttatgagcacccactccaaagccgccgcgaaattcatcgccgacgccgaacgcacggcgtggcacgacaaggcgctttacgccgtacgcgaaaagcgcgacaagatggcacgcacggtgcccgaatgggaagacctgcggcgcatgtcgtccgagatcaagcgccatacgctgagccatctggggcattacctcgaagagttcgaacgcaacgccacggccaacggcatggcggtgcactgggccgccgatgccgacgagatgaacgccacggtgtggcgcctggtgcaggagcacggcgggcggaacctcatcaagagcaagtcgatgctctccgaggagtgcgggcttacgccctacctgcgcgagcggggcgtcgatgccgtcgagagcgacctgggcgagcggatcatgcagttgctggagctgccgcccagccacatcgtgctgcccgccatcggcgtacgccgtgaggaggtcggcgagcttttcgaacgcgagttcggcaccgagcacggcaacagcgatcccacctacctgacgcacgaggctcgccgccagttgcggcccaaattcctcggtgccgacatcgccatgacgggcgtcaacttcgctgtggcttccacggggacgctggccgtctgtaccaacgaggggaatgccgacatgggaacgtcgttccccgacctgcatatcgccatcatggggttggagaaggtaatccccgacatgcaggcgctggcggtcttcacgcgcctcttggcgcgttcggggacggggcagcccgtcacctcctacacgtcgctctaccgcaagcctgcaccgggcaaacggatacacgtcgtgatcgtggacaacggccgctcggagtggctggccgatgccgcgcaccgcaacatgctcaaatgcctgcgttgcggcgcctgcatgaatacctgccccgtctaccggcgctcgggcggctattcctactcctatttcatccccgggccgctgggcatcaacctgtcgatgctgcgttcgccgaagctccaccacggcaatgtctcggcctgctcgctgtgctactcctgctcggacgtatgcccggcgatgatcgacctcggggaacagatttacgcatggcggcaggagttggcgcccatgcatctggccgacccggtaaagaaactgacggtcaaaggcatggacttcatcatgggagggcgacgacgattctacggcggcatcgcgctggcccgcgtcgcggaacatctcccgcacgccgtgctcaacaaccggttcaatccgtggagcgccccgggccgcgacatgccgccgttcgcccccaagacgttcaatgccctgtggaagcggggcgaggtaaaatccggaaaaacgagtaaagatgaataacagcaaggaaaacatactgaaacggatcgccgcggcgggaatgcccgaatacgcataccccgacttcggctacgaaccccagcatttcgacgaccctgcggcgatgttcgcccagcggctccgggcggccgggggcgaggccgtatggctggacggggcaacgacgctcgatgaggtcgtacgccgctgctaccccgatgcgaagagtgtcgcttcggcactgcccgaagtgacgctcgccacggtgaatcccgaccgggtcgaagacccgcgcgagttggtcgacatagatctgggggtcgtttcgggggcgttcggcgtcgccgagaacggtgccgtgtggatcccgcaggacatccgccacaaggcgctctatttcggcgccacggcgctgatggtcgtcatcccgcgcgatgcgctggtcgatacgatgcacgaagccgtcgtgcgccccgaagtcggggacttcgcctacgggtgtttcatgtcgggcccttcgaagactgccgacatcgaacaggcgctggtgttcggcgctcacgggccgatgtccgtcaccgtcgtgctgcgctgaccgcctgccccgggagcggggagtacgccgtgtgccatgtgccggtcgggatttcccgtacctttttctgccgcggcagccggccgttttcgcaggcttgtttttccggtgcggattttttacctttgtcgtatgacgaccgaactttgcgcctacagcgtcgaggcgtgcgagactgcccgccgtgcgggtgtcacgcgcgtggaattgtgtgcctccccttacgagggcggcacgaccccttcggctgccgccatccgtatggcgcgccgtatcggagggttgcagctcagcgtgatggtgcgtccccgcggcggggatttcctctattccgataccgaattccgccaaatgctcgaagaggtgcgcttcgcccgcgaatgtggcgccgacggcgtggtcttcggcgtgctcacccccgacgggcgggtcgacgtgcagcgtacggctgccctggtcgccgaggcggggccgatgcagaccacctttcaccgggcgttcgacatggcgtgcgacctggaggaggcgctcgaagcgacggtggctgccggatgccgccggatcctgacctcggggggccgcaatacggccgtcgaaggcatcgacacgctgcgggcgttggtggcgcaggccgccgggcgcatcgaactgatggccggcagcggcgtcaacccctcgaatgtgcggcagctggcggccacgggcgtcgatgccgtgcatttcagcgcccgcagcgtgcgtccgggcggcatggttttccgcaacccgcatgtttcgatgggcggctgcggcgatgtttccgaatacgatcttctttgtgccgacgaacggctcatccgacaaatacttaccctgctcgaaccatgaaacgcatcatcttccttttgctgggggcgtgtctctgtgcctgcggccgttacggctgcggtgtccccgccggatacgaaccgctgctggatgccgcgctggccggctgcccgcgcgccgacagcctgcggcatttgctgcggcaaaccccgcgcgagcagcgcgaagggatggcctttctgatcgcccacatgccccggggcgaccgcgacacgatgcgcctcgacctgctgcgcgagaatgtggaatatgcctaccgtgcccgccgggactacccttggacacgtgcgctgcccgattccgtcttcctgaacgaggtgctgccctatgccgccgtggacgaggtgcgcgacagctggcgggcggatttctacccgcgcttcgcccggcgcgtggcgctttgccgcgacatccgcgctgcgatcgactccgtgaaccggaatatcgcggccgacgtcggggtggagtacaacaccgcccgcgaaaagaccaaccagagccctgccgagtcgatgcggcagcatatggcttcctgtacggggctttcggtgctgctggtcgacgccctgcgcgcggcgggaatcccggcgcgtttcgccgggacgcccgcatggcacgacgaccgcggcaaccacagctgggtcgaggtatggatcgacggccgctggtatttcacggaatattacccctcggggctcgaccatgcctggttcctttcggatgccgggcgggcgctcgacgaccgtacgcacggcatcttcgccgtgtcgttccggccgaccggcgactggttcccgatggtgtggaacgagcgttcgcgcgacgtgcacggggtcgatgtctcgcagcgttaccgcaacctctatgcatcctacgagcaggccctcgtggcgcagggaaggcatacgacggtgactttcgtgatgtacgacagtgcggcgcacgaaggacgctcggacgcccgcgtggcggccaatgtcgatgtattctgcggtgccgagcagatgggcggaggccgcacggctgggccgaggcaggacatgaacgatgcgttgaggttcctgctggaaaaaggcaagtcctatacgttccgctacgagaacgcccgcggcgaaacgacggagatcacggccgaggtgggcgatgccccgctgaccgttacgggatacatgcgatagccccccccctccctgtccgggaatcccgcctttcaccgccgatggtgccgggcgggctgtcggcccgctccccgaaaatggaaatcacccctgtcggagctatctccggcaggggtgaaatcgtagcaaccgggcttgccggccggcactttccgtcagggctgtttttccgtatccgtgccgggcacttccgcccggaaaccgatgccgatccggtcggtcggcaggctcgggatcttcacgagtccggtgtgcggggcgtgtccgagttccatatgcaggatggggtagggccggcccgaggggtcggccgcgtcgcgcccggcggtgcggaatcccatccgttcgtagaaacccgcggcctgcgggttctgctcgttgacgtcgacccgccgcacgccgcagtgccgtgtgacgtagttcacgagttgccggccaaatcccttgccccgcgccccgggggcgacgaacagcatttcgagcatatcgccggcgacgcctgcgaaggcggtgaacccgccgaactttcctgccccgccggattttcctgccccgccggattttctgcggcagcctccggtcttctctgccccggcgtatgcgccgccgctcccgcatgcatcgcccgatcgattggttccggcctcggattcccttatgacataaaggattgtacccggcagcgcttcgttgcgaaccatctgccggaagaaggggatgtcctcctcgccgaggaaatcgtgcgtcgcccgcacggaggcctcccagagggcggtcagtgcgtccagctctgcgggcgagggctgcgggaggtgttcgatcatgcggtggtaagggttacaataaggtcacgggcggtttctgccgcacgaaattccgggcgagggctgctgcaaaaggcgtgcggaatgtgcgggcaccgaaggcacaccctttcacacaggcgcagcagcggatgcagcgtgccgggtcggtgtgcagctcgtcgccgcgtgcgatggcctgcgtggggcacagtgcgacgcagcggccgcattgcgtgcagcgtgcggcatctccctcgggcagcaggacgacggggtggcgtttctgccggcggcggtatcccagtacgaaccggatgaagcgcagcttcgggaggagcggcgtacgcggttcgcgcagtttcgcggggtcgatggggacaagggcgcccgttgcgggggccttggctgcatccatgctgccggtttgggttgcccgggtggttgctgcggtgtcggatgccgtttccgggttcttgccgggggaaggctctgtttttgctaatttttcgcgcacctgagccccgaatgccctggcggcagccagatcccgtgcgtcggggcgtccctgtgcgatcggggtttcgggcgtgctgtacgaatgctcgccgacgaatgcccctgccgctacgggcacgaatccccgtcccgcgacgaacgaggcgagctctgcgacggccgtgccgaacgagcggttgccgtagacggccagaacgacggccggggtgccttcgccgcggatctcccgcaggcgttccagggctgcgggcgccacgtgccctccgtaaaccggcacggcgaatatggcgacggcttcgcccggcagcggggcggggtacccggcgggatgggtcaggtcgatggccgtgactgtcggttccccgtgcatgcttttcgtttcgcccccgttcccggcggcaggttccggtgccgccgccgctgcggggcccgctcccgggacttgcccggaagagggtgcctgcgccgcgtccgcgttgtgtccggcagactcttctgtggctgtcccttccgtttctgtcatcccctgcaccacggccgcggcgattttccgcgatgtcccggtaggcgagaaaaagagggtgtaaatgcttgtcgttttcatgttcccggcagatttttttcggtataaagataacgtttttccggttgaatttttatatttgccatgaaacctgtaaaattgagaagagatgactacgaagatttttgcatgtgcggcgctgctgctcgcatcatgcggcggtacgcagacggccggggagcaggcgcgggttcccgaaacgaagaccgaagtgaaacacgggccggagatcgcactcctgaagcccgacccgaaatcgggcatgacgatcaacgaggcgttgcagaaccgccgctcctcgcgtgaatatgctcccgaagccctttcgctcgaggagttgtcgggcgtaatgtgggcggctggcggcatcaaccgcccgcaggacggacggctcacggcaccttcggcactggcgttgtatcccatccgcatttatgcgtttttccccgagggcgtttacagctacgatgccaaggggcagaaactggtgcgcgtgacggagggcgaccaccggaaccttgccggggcgcagccgttcgtgtttacggcgccgctcaacctggtttatgtggccgacatgtcggtctatgaaggtaagaatatccccgccgggcatgtccgctacctttgcgggcaggatgccgcaggctatgccgagaacgtcaacctctacgccgcaggccatggcctgaagtcgatcacgcgcggcagcgcccccgaggccgagctgctcgaggccctcggcctcgatcccggccgctacttccttgcgctggcgcagacggtgggcaaatagcggtgtgcccccggaatggaaaagggacggcttttaggccgtcccttttttatttgtccgcaggtgcggctatggccggtcggatggcgcgccccggctttgtgcccgtcccggctttggctcggtcacggcctttcgcacgggctgttgcggggctgttgccggggctcgtccggtcttccgtttccagcttgtcaccgtcccgtcctgggttcggtcacggcctttcgcacgggctgtctaaggcgcgttccccggtgttgtcctgaaggccgtttccggctgttccgtccttagtctgccgaaagcgtctcctttgccgcatcccggccgtcgggttcctccagcgggacgatatagaatccgcgtcccggtgtccactccacgcagaaaagtttttccgcatcggggtaccccgcctgccggaggtggcgcaggagccaccgcttgcccttgccgctgcgctcgagtgcgtcttccatgaccttgcccccgttgacgagcaggtacgattctggcggttcgttgcggcgcgatatggttatccgcccgttggtttcgaaacgcacgtcgtcgacgtcgaacatcgagaagatgccgttttcgcgcagcatggtgcggaactgttccatttcgagcccgttgcggcggaattcgcgcatcaccagccggcggtcgcggacgagcatcaccgagtcgcccttgatcgccctgcggatgcggtggaagcgcatcaggtagcgcagcgagacgttggccgccgtccacaccgcgaaggcgaataccagataccataccggggtgtcggggttgtagattacgccgccgaccagcgccccgagtacgaacgagtttaccgaatcgaggggtgtgagctgtgccatctgggtcttccccgatatgcgcaggaaaaagatcacgcccagcattccgaccagcagtttgatggcgatggatagatacatggtgtgcaggttttgttttccgtttcccctcaccctgcaaattccgcgcaaatccggaaaaacctacccggcggggggctccatcctgcgaatagcgtggtacggccgtatctccggccgtcttcctcggggctaaaggccgtactccgcggcgtaacgccacaggggtgcggccatcagtgcctgccggatgcggccgctttcgagcaggtcgcgcacctcggcgcccgagaacaggtgcacgcggatgtcctccgtagcatcgaggtgctgttcgcccaggcgttccacgcccgtcgccaggtagcagtacgtcaggttgttctgcgtcgaggggttgggcgccacgaccattagctcgcgccactggccgccgccgtaccccgtctcctcggccagttcgcgctgtgccgcggccagcatcgaggcgtcgtcgggctcggctacgcccgccgggatttcatagtccgtttcgcccagcccgtggcggtactggtcgataaagacgaatttcccctctttcgtaatggcgatgacgttcacccagtcgggatattcgaagacgtagtagtcgggtatgcggcgcccgtcgggcagttcgatgctctcgtggcgtaccgtaaaccagggtttgcgggcgaggtattcgctcgtgagaactttccagttgcgttttttcggattttccatggcggcgtcttgcttgtcggatgcaaaaatagcgaaaaatagttatctttgtaacatccgtaaaaaaacatccatgttgtcccagaacgaacgaaagcgtatcatcgccctcatcaaccgcgaagtggtgcccgccatcgggtgtaccgaaccgatcgccgtggcgctgtgcacggcgcgtgcagccgaactgctcggctcgcgtcccgaaaaggtcgccgtgcgcctgagcgccaatatccttaagaacgccatgggcgttgggatccccggtacggggatgatcggcctgccgatcgccgtggcgctcggggcgctcgtcggccgttcggagtaccggctggaggtattgcgcgacgtgacgcccggggccgtggagcagggccgccggtatatcgacgaaaagcgcgtatgtatcgacctgaaggagggtatcgccgagaaactctatatcgaggtcgaggcccggggcgccgggcactgtgccacggcggtgatcgcgggcggccatacctcgttcgtatacctcgagcgcgacggcgaggtgacgctcgacaaacgtacggcctcggcggccgaagaggatgggggcgaagtacccctcacgctgcaccgcgtgtgggagttcgccacgacggcgcccctcgacgaactgcgcttcatcctcgaaacacgccgcctgaacaaggccgccgccgagcaggctttcgccggggagttcggccactgcgtagggcgtacgctccgttgcgagcgagaacggaagattatgggcgacagcatcttctcgcggatactgtcctatacctccgcggcgtgcgacgcccgcatggccggggcgatgatccccgtgatgagcaactcgggaagcggcaaccagggcatcgcggcgacgcttcccgtggtggtctacgccgagcagaccgcagccaccgaacagcagacgatccgtgcgctggtgctgagccacctcacggtgatctatatcaagcagagcctcggccgcctgtcagccctgtgcggctgcgtggtggccgccacggggtcgagctgcggcattacctacctgatgggcggcgactacgggcaggtcgcggcggcggtgaaaaacatgatcgccaaccttacgggcatgatttgtgacggagccaagccgagttgctccatgaagctcacgagcggcgtctcgaccgctgtgatctcggccatgatggcgatggacggccattgcgtgacgcccgtcgagggaatcatcgaagaggatgtcgacaagtgcatccgcaacctcacggccatcggccgcgacggcatgaacgagaccgacagggtcgtactgggaataatgacacataaatgctgactatgaataaactgaccatgaaaatgaggctccttgcggcgttcctgctgctcggcctctggggcgccacggcccagaccgcccgtgagcagatcgccgccatgcccgaacgcgcgggcgggatttaccactcgtacgagtacctgcccggccccgccgtacccgccccgaagggctatgttcccttctacatcagccactatggccgccacggcagccgttggcatacttcggaaaagatctatgccgagccgctgggtatcctgcgcaaagccgactcggccggggtgctgaccccgaaggggcgcgacctgctggctaaggtcgaggtcattgcagccgatgcccgggatcgttacggcgacctctcgccccgcggcgtggcggaacaccggggcatcgccgaacgcatgtataaggcctatcccgaggtcttttcgaccggggacggccgcgaatgctttgtccagagccgttcgacgctcgtgccgcgctgcatcctgagcatggcggccttcaacgagcgcctcaaggagctgaaccccgaaatccggatgacccgcgaatcgagccagcgctacatcccttatatgagcaacggcgcagggttgaattcccagcgaaaggcatccggtgccgtggccgacagcctgcaggatgcccgcacgcatcccgcccgtctgatggcgtcgctcttctccgaccccgccttcgtggaacgcgaggtgaaaaggccggcgaaactgatgaaccagctgttggcgcaggccgccatcatgcaggacgtcgaatacctgggcatctcgctctacgacctcttcaccgaggaggagatatacgccgcctgggaagccgagaatttccgccgctacgtgatgttcggcccgtcgaagcgcttcggcgacccgatcatcgccgatgccaagccgctgctgcgcaatatcgtggagactgccgaacgggtcgtcgcgggggaggagaacctctcggcctcgctgcgtttcggccacgacgtgaacgtcattccgctggtggcgctcctgggcgtcagggaggcttccgggcgcgtatggacagccgaggaagctgccggggtgtggcagatacaccgcgtatcgcccatggcgaccaacgtgcagttcatcttcttccgcaaccccgagaccggcgacgtgcgggtgcgggtgctgcacaacgagcgcgatgccgaactgccgatcggcggcggcccctattatccctgggagaccctgcgcgactactgcaagtcgctctatgaatgacatgccccgtgccgggcataaaaataaaggggctgcccgccggttccccggaatgaaaatcaccctcgtcagaagcatttctgacgagggtgattttttaagccggcttgccgggcaaccttttccgcggctttttccgtggctttttccgcgactttttccgcgactttttccgcgactttttccgcgactttttccgcgactttttccgcgactttttccgcgactttttccgcgactttttccgcggcttttccgtggctttttccgcggcttttccgtggctttttccgcggcctttccggggggggccaccgatagtcccctctttggggacggctaatggaagatggtcttgacgatgatgttcgtggcgccctggtgacgggtggtgtagtctttggctatacggcttgttttcagcaggaaatcctcgttgtcgcgcaaggggatgaaccacgtgcgcagttcgtcgtagtttttcaccgaacgggcggcgccgagcgtcaccaggtcgcgtgcctccttgaatttcgcgtagttggggccgaatgccaccggaagcccgaatgtcgccgcttcgagcgtgttgtgtatccccacgccgaacccgccgccgatatagctccacgtcgcgtagccgtagaccgacgccaggatccccaccgtgtcgaggatcagcagttgcttcgacccgtaggccgtgtggggcgtgcactgcgtgtagcggagcgtcccgcccttggcctcggccgcgaggcgtgccatgcggccttcgtccatctcgtgcggagccacgatgaatttcacgtcggggttgtcgtttatcaggcggatcagcagctcttcgtccgggttccaggtcgaacccgccacgaagaggcgtttgtcccccttgaaccggtctatgatgtcgatatgtttggctgcggcggcgatttcggccacgcggtcgaaacgcgtgtcgcccgctacgatcacgttgtcgaatcccagcccggccagcagctttttcgactcttcgttctgcacgaacatcacgtcgaaggactccagcgcctgcctccacatgccgccgtaggggcggaagaagatcgagttgcggcggaagatggccgagacgatataggtgcgcaccttgcggcggcgcaggtcgcgcagcaggttgagccagaattcgtattttacgaagattgcgatttcgggatgcgccgcatcgaggaaccggcgggcgttgcgcggcgtgtcgatcggcaggtagaagatgtaatccacaccctggtaattcttgcggacttcgtagcccgaaggcgagaagaacgtgagcaggatcttgtattcgggatgggtcttgcggatgcgttcgatgatgggccgcccctgttcgaattcgccgagcgacgcgacgtgcacccagacgatgcggtcggtcgggtcgatggtctcggccatgcgtttatagaggtctttgcgcccgtctatccatagccgtgccttcggatgcctcggtgcgaccagccggatgagccacacatagagtgtcagaccgaaattatataaccacatcggtgtttacggtttgcggtgttgaagtactatacgttaactttcgccgggtgggcccgggtttttccggccctgtacgcagggctttcattttcagtgcgacaaaggtagtataatttgtcggaaatgcaaaattaccagttgtattccatcgcccgctccaccaggcgcacctccatgcgtccgtcgggcatcacgtccacggccgccaggtcgaactgcgcctcttcctgcccgcccgttgcggccaggtaacgcacggccgcccgtgtcagtgcgcggaatttctgcggtgtgacggcagcctcgggcggtgtcagggagccggccctgcgggtcttgacctccacgaaatgcacgattcccgccttgcgggccacgatgtccagttcgtagcggccgctgcgccagttgagggcgcagatttcgtatcctgccccgcgcaggtactccactgcggcgcgttcgcccgcgcgccccgtttcggccgtcgtgcccatgcccgtcagtggatgatacgctggatcgagttggcccgctcgaaggcggccttcagcccttcggcgtcgtcgcgctcgatcatccggcgcatgatctgcaactggtggatatgttcgcgcagcacgtccagcaggttgtatttgttgcgcagcatgatcggcacccacgtggcggccgaacttttcgccagccgcacggtgctctcgaacccgccgcccgccaggtcgaagatgtgccgttcctcgcgctccttctcgagcacggtcagcgccagcgcgaacgaggtgatgtgggagatgtgcgacacgtaggccgcatgcaggtcgtgctcctcggcgtccatgtagacggcgggcgcctccagcgtgcggaagatgcgctcggccgtcgccaacgcgtcggggtcgctccgctccgcctcgcaaagcacgacgttgcgccccgtgaaggcaccgtgctgggcggcgcgcggcccgctgtattcggtgccccacatcggatgggcggccacgaagcgcccgcggcgggcgtgcatcgagatcacctcgcacaattcggccttgatggagcccagatccattacgacctggtgcccctccacgcggttgagggcttttacggccatcagggggatcgtatcgacgggggtggccagcaccacgaggtcggcctgcgggatgccctcttcgaacgccacgatgcggtcggccagcccgagccgcagcgcctcggcggcgttctccccggaactgtctgtgccgagtatttcgtccgctatgccgcggtcgcgcaacgcgagggcaaaagagccgcctatgaggcccatgcccgctatcagaactttcatacctatatataaatatatttattggccggaaccgcttccggccgggaatcagagcaggaacgacaagtcgctgcccggttgtacttcgaagggctccgtgcccttgcggaacatgcgcatcgggcgcttgccgatcagttcgagtttcccctccgcatggcggagcatgcacccttcgcgcagcccggcgacccagcgccgcggattggcctcgatgtattcgaggatgcgctgctcgcgcgtctcgccggcgtgcccctcggggttggcgtcgaggtagtgggggtttatctggaactttacggccccgacggccttgaacgactgcggttcgacgatgggcatgtcgtttgtggtgcagatggtgggacatgccacgttgctgcccgccgaccagccgacatagggagtcccggccttgattttacgcaggatggcggccataagcccctgttcctgcatcttttttgccagcgcgaaggtgttgccgcccccgacgcacagggcttctgcctcgcgtaccatgcgtgcggggtctttggcccggtgtaccgagcgcacgcggatacccagctccgagaagcgtgcctgcacctttttttcatactcggcgtaggaaaatgtcacggcggcataggggacgaatacgatttcgctgacgccctgcaggaaacgcccgatttcgggcatcgggtaacggaggtattcctccccggcgttggtcgaattcgagatcagaagcaatttcataagcctatggttttgaatcggttaatttaaaaaatgtgctaaatgtcgaaaaagttgtgaataaaaaaaaggtctgttttgtcaaaagtaataaaaaaagtgttacttttgcgcaaaattaccccggaaatacgaaagaactatttccaaataattgtttaactaaaaaattaaaattatgtcagaagttcaatcaaaagttgtcgagatcatcgtcgacaaactgggtgtcaaggaatcggaggttgtacccgaagcaagcttcaccaaccatctgggtgctgattcgctcgacaccgtagagctgatcatggagttcgagaaggctttcgatatccagattccggacgaggacgctgagaagatcgctaccgttggcgacgctatcaagtatatcgaagagcacaagaaataatttataaaaagagcattcacagcctcttatagccttaaatttatgacagaaagaagagtagttgttacgggcatcggtacgatcaacccgctcggtaataatattgaagagtatttttcgaatttggagaagggagtcagcggtgccgcaccgattactcatttcgatgcagagaagtttaagacgaagtttgcttgtgaagtaaagaattacgactcgaacctctatttcgaccgtaaggaagtacgcaagtacgaccttttcacccagtatgccctgatcgcggccacgcaggccgtcgaggattcggcgctcgacctcgaggccgtcgacaaggaacaggtgggggtgatctggagttcgggcatcggaggaatcaaatctttcttcgatgagtgtctgggctgggccgcaggggatggaaccccgcggtttagcccgttctttattccccgcatgatctccgacatcgcagccggtttcatctccatgaagtacggcttcatggggcccaactactgcacggtgtcggcgtgcgcatcttcgaaccacggcatgatcgccgcgttcgacgccatccgctacgggaaggccgacgtgatggtggccggaggctccgaagctgcggtcaacgagccgagtgtcggcgggttcaactccatgcaggcgctctccacgcgcaacgacgatccccagcacgcttcgcgtccgttcgacaaggatcgcgacggtttcgtgatcggcgaaggcgccggagccctgatcttcgaggagtatgaacatgccaaggcccgcggtgccaagatctactgcgagatcatcggcggcggcgcttctgccgacgcttaccacttcaccgcccctcatcccgaagggaagggtgctatgaagtcgatgcgcgacgccatcaaggacgccggcatcaaacccgaagatattgattatgtgaatgtccacggtacctcgacccccgcgggcgacatccccgaactgaaggctgtcgccggtgtgttgggcgaccacgtttataacgtcaatatctcttccaccaagtcgatgaccggtcacctgctgggtgctgccggggctgccgaggccctggcctgcatcttcgccatcacgcacggcgtggttcctccgaccatcaactgcgagaacctcgacccggagatcgacccgaacctgaacctcacgctgaacaaggcgcagaagcgcgaagtgaggtgtgccctgagcaatacgttcggtttcggcggacataactccacggtcattttccgtaagatctgattaccttaaaaccgtccgggcccgtgttcgatttcatactgcgcccccttagaaggaatttcgggcgggataaggcgtattacaagattgtcgatgatatgttcgggtttatcccgaacaacatcgaactttacaagctggctttgattcacaagtcagcttctttggttctggaggacgggcgcccgatcaacaacgagcggctcgaattcctgggcgacgccgtgatagaggccgttacctcggactaccttttcatcgagtatcccgaccgggacgaggggttcctcacgcagctgcggtcgaagatcgtgtcgaggcagtcgctcaacgagttggccgtaaagatcgatctggatcggcatgtcatctcgaacgccagtacgagcatcagccagaagcatatctacggcgatgccttcgaggcgatgataggtgccgtctacctcgaccaggggtatgagttcaccaaccggctgctgatcaaccggatctatttccaggccctgaacctcgacgaactgaccgagtcggagaccgacttcaaaagccggctgatcgagtggtgccagaagaaccacctcaagatcgtattccgcacgggcaacgacaaggggtactcctcgaaccaccccgtgttttactccacggtgctggtcgacggtatagaggtggggcacggctcgggcgattcgaagaaagaggccgagcagcatgccgcattctccgtggcggagtatatgaccgacgaacagtgcgcgtcgctgctggacagggtcgaccggctgacgcaataacttttggttatactcggcggccgaagccaggggcattggggcggagcggcccgggttgcgaacctccggattccatgtcggcatcagggggtttctgtggccgatgctgcggcagctggtagctggtagaacccggaagccgatcgcccggctcccgtagctggtgtcccggcggccgatgctgcggcaactggcagctggtagaacccggaagccgattgcccggcttccgtagctggtgtcccggcggccgatgcacgtatgccggaacaaccctggcacaccttacttgccgatgtccggaactctcttaggcggtcgatgccctgggccggccggatacttacgatatgcggcccggtcttgtgtccgataacttttccgcataccgcgcgatgtacacccgatttcccacccgatatttcccctatgaagacgataaccgataagatggcggcacggggtgccgaatccctcagcgatgcggagttgctggccgtgctgaccgatgacgaacagacggccggggcgttgctcgcggcctgcggcggtgcgctcgcgcgtatcgcgtcggaagatgcggcccgcctgcggatggtcggcgggttggggctcaggcgtgcccgcctgctgcttgctgccgccgagttcggccgccgcgtcgcggcgtcgcgggctgcggaagcggatgtcattgcgacgagcgacgatgtggtggcgctgttccgcccgcagctggaaacgcttgcctatgaggagtgttgggcggtttacctcacctcttccaaccgcatcatcgagcgccagcgcataagccagggcggggtgcagggaacggtcgtcgaccaccggctgatcgtcaaacgggcgttggaactgctcgccacgcagctggtgctgatccacaaccacccttcgggggctgcggcgcccagtccgcaggacaaggtgctcaccgagcgtgtcgcacaggctgcggcactgttcgacatccggctgttggatcacataatcatagcgcgcgaaggcgatttctcgttcctgcgcgcggggctggtgtagcactatttcttacttccggcattgccgcatattgctatgatagcgatggcaatgagcgcaatcagaagtttcatcgttcccgtcatttgtttgggtcgtttcatcggggcgggacgcaaaagcgcggactcgatcctacatccacggcagaggtattggacgacccgaacggtagaatggtagaatatgcccgcgctgaaaaacagcgagagcatcaaccttcgttccttaccgtccgggaaagtgtccaattttctgccggaagaaaaaagccgatgcacttttttgtctcttatgtcggcggcccatggcaggccgccgtggcaaatatagaaataaattcgctacggaaagacgtagttcccaattattttgtacttttgtaattcggaaaataatttaaaaacaagataaaatgacgcaggaagaacttttcaaaaaactggtggcgcactgcaaggagtacgggttcgtattcccctcgagcgagatatacgacgggctcggcgccgtctacgactacggccagaacggcgtggagctgaagaataacatcaagcgttattggtgggattcgatggtcaagctgcacgagaatatcgtggggctggacgccgcgatcttcatgcatccccgcacgtgggaggcttcgggccatgtcggtgcgttcaacgacccgctgatcgacaacaaggactcgaagaagcgttaccgcgccgacgtgctgatcgaagactggctcgccaagcaggatgaaaaggtcgaaaaagaggtcgaaaaggcccgcaagcgcttcggggagtcgttcgacgaggagaagtaccgcgagacttcgccccgtgtggccgaaaccctcgccaagcgcgacgaggtgcacaagcgtttcgtggctgcccagaacgccagcgacctgaatgaactgcgtcagatcatcgtcgactgcgagatcgtgtgcccgatttcgggtacgcgcaactggacggaggtgcgccagttcaacctgatgttctcgacccagatgggctcgacgtccgagggtgccaatacgatctacctgcgtcccgagacggcacagggtatcttcgtcaatttcctgaacgtgcagaagaccggccgcatgaaactgccgttcggaatcgcgcagatcggaaaggcgttccgcaacgagatcgtggcccgccagttcatcttccgtatgcgcgaattcgagcagatggagatgcagttcttcgtacgccccggcgaggagatgaagtggtggcagcagtggaaggagacccgtatggcctggcaccgtgcgctgggcttcggcgacgaccgctaccgtttccacgaccacgacaaactggcgcactatgccaatgccgctaccgacatcgaatacaacttcccgttcggtttcaaggaggtcgagggcatccattcgcgtacggatttcgacctgggcaaccaccagaaattctcgggcaagaagatccagtatttcgacccggaaacaggcgagagctacgtaccctatgtcgtcgagacctcgatcggtgtcgaccgcatgttcctgcaggtgatgtcggcggcttacaccgaggagcagctcgatggcggcgattcgcgcgtcgtgctgcgtttgccggctgcgctggcgcccgtgaaggtggccgtgctgccgctggtgaagaaagacggcatgcccgaggtggcgcagcggatcgtcgacgacctcaaatacgattacaacgtcgtttacgacgagaaggattccgtcggcaagcgctaccgccgccaggatgccatcggtacgccgttctgcgtgaccgtcgacgggcagacgctcgaggacggtaccgtgacggtgcgccaccgcgatacgatggagcaggagcgcgtcatgatcgagtcgctgccttcgctcgtcgaagaggagtgctcgtaccgcaagctgttccggaaaatgaacctgtagcggggcgattatgggccggttcaatattttcgattccgacagcatcgtcgagggtgaaaaacggcgtttcccctggtgggcgctgctgctttgcctggcggccggaatgctggccggctggctgctgaggaactactgttatatgggcggcgaatccggcttgaacctttagtgcatgggacggatacttgccatagactacgggacgaagcgcacggggattgccgtgagcgacccgttgcgtctgatcgccggggggctcgatacggtcgatacgaagggacttgaggcgtggctggcaaaatatttcgcctcggaggacgttagtaccatcgtggtgggaaagccctcgcgcatggacggcacgccttcggaaacgtggcgtttcatcgagccgctggccgtgcgcctgcggaaggcctggcccgacaaggaggtcgtcttccacgacgagcgtttcacctcggtgatggcgcaccgcacgatgctcgaaagcggtatcggcaagatggcgcgccgggacaaggcgctggtggacaagatctcggccacgattattttacagagttatatggagtttaacaaatgatttatccgatagtaatttatggttcggacgtgctgcgtaagccctgcgagcggatcacgcccgattatcccgaggtgaagaaactcgtggaagatatgttcctgacgctcggcgaagccgagggcgtcgggctggcagcaccgcagatcggcaagaatatccgcctcttcattgtcgattgcacaccctggggcgaggacgatcccgaatgcgcggactacaaacgcgcctttatcaaccccgagatttatgccttgtcggaggagaagaagacctacaacgagggatgtctctcgttccccggcatccatgccgacgtgccccgctcgctggcgatccggatgcgttatatggacgaggatttcgtcgagcacgacgaagagttccacgggctgaaggcctgggtcatccagcacgaatacgaccacatcgagggcatcgtcttcacagaccggatttcgcccctgcgccgcaacctgctgaaaggaaagctgatgaacctggcaaagggcaaataccgctgcgcgtataagaccaaatgacccgtatgccggggccatgcgcccgcaggggcggcccgcaggctgcgcaacaggttccgtccggcggaaaagttgttccggccatgcaaaggcaaacgggacgttcgcccggccggcaggctccgtaacggtgcggccgcggggagccggcggtttttccgcatggcgaaacaggaaagaggctgcctgacaagctcccaagataaaacgcacccctgccagagattgttctggcgggggtgaaatcgtaaaatgcggacttgtcaggcaggcccgtctgcgtcaggaacggcctctgtcagaacctgtatgctgcgcctacgaaaacgacgagcggattgctgcggccgctgtcgaacatgggttcgtatttcagacctgcggagatgttccagcggcgcgcgacgttgaagtcgaaaccaccgccgacgctcatgccgaatgcccagtccttgatgtcattggcgacaacgcccacctggggatagacgccccaccagtcggcgatgcggaatacgtagtgggcgtcgaaattgatgtcgaccgaactgtccttttccgtcaggacatagatcgacggttcgatacgccagtgggaatcgaaactgtatcggtagtaggcaccgattccgacggatgcgtcgcccgtattggtatagaagtttacgcgcggacccacggcgctgcggtaattttccggcgtgctgcggtaattgcctgcctgggccgcattgcggttgttgtcacgggtgttgcggtagttgttgtcctgggcggacgccgtccaggcaaacaatgccgcggttgcgatcagaagaatttttttcatggctttcagtttaattttatatgaataatcaagtggttgtcaattagtcacaggatcccatcccggctggggacgacctctccgatgcgctgccttgtcgcctgaacgacgtacaacactcgtgccgtgatatgtgtttttcggattttgcggatcacacttttgcaacttccgccgtcgcttcctgtatccggcggaagctattcagccggcacgggatagccgggatcggggctgcggacatgaaaaatcccggcacttacgaataagtgtcgggattttgtttcctctcgggatggggcttagaacctgtacgttgcgccgatattgataacgatggggttcctgcgcttcacaaagccgggtacataatccttggcggtctggatcatccatttgaagccggccgaaacgtcccagttgcgggtgatcgagaagtccgcgccgccgccgaggttgataccgcacgaccagtcgccgatgtcgttggcgctgatacctgccagcggatagatatgccagtcgggggcgatgttgaacaggtattgtacgtcggcgctgatatccaccgagcaacccgtcttgcaaagggccaggatactgggagctacacgccagttgtcggtgatgctgtactgtccggccgcaccgataccgaagatggctccgtcggcacccgcattcgtgtataccccgattttggggccaactccccagtcgcccttgtactgtgccgaaaccgtcgttactgctaaaagcacgacgatcaccgtaagaaaaatctttttcatgtctgttgctttaatttaacaaaagttgcgaataatactgtttactagaacaaatatacaaaatttatccgccacggcaaaaatttttcaacgaaccggacttttttgtcgctaaaaacgaaagcccgcggcatgcacgccgcaggctttcgctggtatgggtgttccggcggttgccgggtgaaggcttatttctccttgagggctgcgtgggcggccgccaggcgtgcgatgggcacgcggaacggcgagcagctcacgtagttcaggcccgcgtagtggcagaattcgaccgacgaaggttcgccgccgtgctcgccgcagatgccgcacttgagcatcgggcgcttgccgcggcccttgaatacggcctcgcgaatcagctgtcccacgccgttctggtcgaggatctggaatgggtcgttcttcaggatgcccttgtcgaggtagatcggcaggaacttgccgatgtcgtcgcgcgagaagcccagcgtcatctgcgtcaggtcgttggtgccgaacgagaagaactcggcgacctcggcaatttggtgggcggtcacggctgcgcggggaacctcgatcatcgtgccgaccatgtagtcgatcttgtcgttgcgctccgagaatacctgttcggccgtcgagtcgatgatgcctttctggtagcgcagttccttgtggttgcccacgagcggaaccatgatctcgacgtgcacggggatgccctgcgcacggacattcatggccgcctcgatgatggcgcgtgcctgcatctcggtgatctcggggtaggtgttgcccaggcggcagccgcggtgtcccagcatggggttgaactcggccagcgactcgaccttggcgacgatcttctggagggggacgtccatctcacgggccatctccttctggcctttctcgtcgtgcggcacgaactcgtgcaggggcgggtcgagcaggcggacggtcacggggaagccgttcatggccttgaacaggccttcgaagtctccgcgctggatgggcagcaacttggccagtgccacgcggcgtccggcctcgtcgtcggcgaggatcatctcgcggaaagccttgatgcggtcgccctcgaagaacatgtgctccgtgcggcagaggccgatgccctcggcgccgaatccgaatgcctgtgcggcatccttcggcgtgtcggcgttggcgcggactttcagcacggcgtatttgcctgccagatccatcagctggccgaagtctccgctcaggtcggcggccatcgtggctacctgtcccaggtaaacttcgcccgtcgaaccgttgagcgagatccagtcgccctccttgacggtgaagccgttgactttgatcgtgcgggttttatagtcgatttccagctccccggcgcccgatacgcagcacttgcccatgccgcgggcaacgacggccgcatgcgaggtcataccgccgcgggcggtgaggatgccggcggcgtcgagcatgcctttgaggtcttcgggcgaagtttcgatgcgcacgaggatcgctttctgaccggtttgggcgagggttttctcggcatcttcggcgaagaataccacggggcccgtcgcggcgcccggcgatgcgggaaggcccttggtgatgacctgtgcattggtgatggccttcttgtcgaatacggggtggagcagctcgtcgagcttcgcgggctcgcagcgaagcacggccgtgcgttcgtcgatcagcccttcgcggagcatgtccatcgcgatcttgaccatggccgcgccggtgcgtttgccgttgcggcactggagcatccacaacttgccgtcctggatcgtgaactcgatgtcctgcatgtccttgaaatactgctccaggtggtgctggatctcatcgagttccttgtaaaccaccggcatgacctcttcgagcgagggatatttcgtgcggcggtcttcctcggagatgttctgtgcggccgcccagcgcttcgacccttcgagggtgatctgctgcggggtgcggatgccggccacgacgtcctcgccctgggcattgatgaggtattcgccgttgaagaggttttcacccgtcgcggcgtcgcgcgagaaggctacgcccgtcgccgagttactgcccatgttgccgaataccatggcctgaacggtcacggccgttccccactcggcggggatgttgttgagcttgcggtagaggatggcgcggtcgttcatccacgaaccgaatacggcgcatacggcgccccagagctgatcccagggacatgccgggaagtcctcgccggtctgcttcttgacggcagccttgaagttcctgaccagctccttcaggtcgtcggtcgtcaggtcggtgtcgttcttcacgccgcgtttgtgtttctgctcctcgatgattacctcgaacgggtcgtggtcttctttcgattcgggtttcatgcccagcaccacgtcgccgtacatctgtacgaaacggcggtacgagtcccatgcgaaacgggggttgcccgtacgcttggcgacggcttccacggcttggtcgttcatacccaggttgaggatcgtgtccatcatgccgggcatcgaagcgcgggctcccgagcgtaccgacaccagcagcggcatctccttgtcgccgaatttcatcccggtgagcttctcgatatttttcatcgccttctccacttcgggacggagcatctggatcacggcgtccttgccgtgggcgtaatattcggaacatacttccgtggtgatcgtgaagcccggggggacggggatgccgatgaggttcatctccgcgaggttcgcacccttgccgccgagcagctcacgcattttgccgttgccttcggcttccttgttgccgaaggtgtagactcgtttaacgtctgccataatttttcttggttaatttaattggtatataaatttataaattttttgtcaacttgccgcttttcacagacgaaaattgcggtgacattcctgttaccgcctcgtcaaagaattcatattcgccgttgggaatgcgaatatataaaaacttttccggaattccaaaaaaatctactccaagtaaacgaataccggcagggcgtagccgtaaccgcccctgtaccgccttttttcgtaggtcggaagcggggtacccgtcttggggtcaatcagataacggcgcgcatagacatcgcccgccgaggtgcggagcgccgtgtcggccagaatgcgatcgcgcatctgccagccgccccggcggcggacgttgccccgcccgagccgtgccgggcgctccagtgcgtcgcgcagcccgaaggctccgggggcgagagacgaggtgcgtcccgcgacgagcagcttcaccccggggcgctcttcgcgcaggtcgcggacgacccattcggccatgcgggtgtcgctgcacagcacgagccctatggtgtcggtgcgcgtgggacggacgacgcgtccggatccccgtcgcatgggtttgccgcggcggtagaggaggccctcgatgtagaggtagcggcgccccggctcgtcgtagtggggctcgaagaggtcgccgtaatagagcagtgcgaaatccatgccgtcgagggaattgagcgtacggtgcaggtagctgtaatcgcccttgcaggcggctgcgatgtcgcggacgacggcttcgttctcgacgccccacagcgccacgagcggcatgcgcatcgagtcgatgacggccgccgtatggcgtatcttgcggcggtagcgctccgtgtcccacgccaggcgtcccgagggcgtgtagtcggtgtcattgtagaacagggcggggacagtgtcgtagagatggtcgagatcccagtagacgatgcccgtgcgcggttgtgcatgggcggggatgcctgccaggaagagcagcagggcggttatgatgcgtggcagccgttgcaaggcgcgtaaagcccggctgcccgggacgaggcgtgcgtggccggttgcggcgaggacggttatgatgcggcgcagcgacataggccggggttataacggctcctcgggcaggaacttgcgcggcgagcagcccaggaaccgggcgatctcgttgatatggttgaggttgtattttgaaggatttttcgggctttcaacttgtgaaatgaatccgtcgcttactcctataccataagccaatgtggcctgtgaaacacgttgagccatccgctctttgcgaactgcggcactgacgtatatgtcgaaagcacttttcggtttcacaagcatctgtttagatgatgtaaaactaaaaattatgccattgtgaaagtatagttataacttaaattcgcctatgtataggtagttattaagccggtgtactacggcctttgtgccggaatttttgtttttggtatctttggaggggaaatgtatacgattcttttggttccaagagtttttttgcaaattccgccatgtacttttttccgcaaaaagtaccaaaaactctccgacggatgcctcgcctgctcttggcgtcctaacgctggaaacgggcgcctaatcgcgggtttgcaagcaaacctgccccgtttctcgcgcttttagtccgccgtccgccgacggctccggcatcaagtcggaatctttgttatcgtgtttctctgtttttttgccgcacagcgagaattccggacagcaggattttccgcatttcgtttgcagcggataaagagcggctgcggcgccgagcgcccggaacgggcgtgcgaaaagcgcagtctttcgtgcccgttcagcgaggctccgcagttgctcccgcgaaaacggcatgcggatggttttgggtaccttttgccaccaaaaggtacatgactgcgttgctgaaagcaacccgacttttcctgaaatacggattattggcgtttcaggtgaaaatccgggctggagcgggattattccgagatcacccccgaaccgaccagctcgtcgccgtcgtaccatgcggcgaactgccctggtgtgatgccccgctggggggtgtcgaagaggatgtaggctccctggtcgcggacgaagagcgtggcctcctgcaaaggctggcggtagcggatgcggacgctgaagcgggcgctttggcctgccggcatcgtgcgcgcggggttgacccagtgtatctcgcggggggagatatgcagtgcctgtcgccacaggccggggtggctgtcgccctcgccgacatagatgacgttctgcacggtgtcggtggcgaggatgaacaacgattccttgcgcccgccgatgccgagccccttgcgctggccgatggtgtagaagtgcgccccgccatgctcgccgattttcttgccgtcgcggacggtgtagcgccacggggcggccagtgccgcaagctgttcggtcgtggggggtacgtcggccgcgtgctgtccgcccggggcggggattgcctgtccggcatcgggtgtgcccgccgggattcgggccttggggccgtatttcggccacgtggggagtatctcgtggacgttaccccttttcgaggccagcttctgttgcaggaaggccggaaggtcgaccttgcccacgaagcagatgccctgcgaatccttgcgtttggccgtggccaatccctgttcggcggcgatgcgccgcacctcgggtttgagcaggtcgccgacggggaacagggcgtagcgcagctgctcctgcgagagctggcagaggaagtagctctgatccttgttggggtcggcgcccgcgaggagtttatagattgtccgtccgtcgggcagcgtctcctcggccttgcggcagtagtgtcccgtggcgacaaaatcggcgcccagccggaacgcttcgcgcaggaagacgtcgaatttgatttcgcggttgcacagcacgtcggggttgggggtgcgtcccttttcgtattccgagaacatgtaatcgaccacgcgggtgcggtagtccgccgagaggtcgacgacgtgcaacgggatgtccagtttttttgcgaccagctcggcgaagacgcggtcgtcgtgccacgggcagtcgccctcgagcgttcccgtcgtgtcgtgccagttgatcatgaacaaccccacgacgtcatgcccctgctgtttgagcaggtaggcggcgaccgatgaatccacgccgcccgaaagtccgattacgacacgtgccatattatgggataaaagcgattaagttattcaaagcatgcaccgcgaccaccagccagaacgcctgtgcaaaaccgcgccgttcgagtcggctcaagtaggcgaaagcccagaccagcccgacgaagagcatgcagactgcatagatcgggctcgcggtgtgtccgcagccgaacaggatgcccgaaacggcgatcggcaggaggaatgatgccggggcaacccaacgtacgagccggatgaccaacgcctgggctatcagcgtttcgaacaacggcgcaaggattacggcgacgaaccaaccgatgcgttcggcgcggtcggaatccatatcggcgtcgtcgatgcccgcggtgagcccgaacagcagcagcgcgagcagttttgcggcgaaggtcatgacgagcagcaggacggcgaacctccaccatgccatgtgtcccaatgctatgcgccagcggtgcaggaagcggggcatacggcgggtgtttgtcgggcgtagcggtttcatgggtgttacaggtcgagcagcccttcgggcagcaccagtttcatcgtgcgcccctcgaagtcgatatgggcgatgaactcctcggcggcggggacgagtaccgtgcggccgccgatctccaattcgaaaagcgggttggcgtcgctgtcgtagtagtccgtgaccgaacccgtgaaggcggccgctccctttgcgccgtccgcgcccgcttcggtgcaggtcacggcgaagccgatcaggtcttccagatagaattcgtcgtcctcctcctcttcgcattcgatacggaattcaagcccgacgagctcctgagcccggcgctcggtgtcgaaatcggcgaatgaggccacggcgcccgagctgccgcggcgttcgaagcgctcgcagtagagcggcacctcgagggcgtcgatcgtgaccagcagcggggtgccggtaccgaattcctccgggaaatcggcatagagcgacagcatcacaccgccgtcggtgccgaaaagcctgttgatcctgcctgcgggaatagtaacgctcatatcggttcgttttttttctcttatgtccgtatcgcggtgcggaacgggggaagcgggtatcccggtgctccgttacacccggccccgctgtgctgccgccttgtcgtgccgtgcagcgcctcgctgtgccttgccggacgattcccgcacgggatgcgcccgcgtgggaactatctgcaaaagtaatgaaaaaaaccggtaaacctcccgttgcgggaaatttaccgggattccggaaagaagctttcctggtgttattctgcggcaggagcctctgctgcgccctctgcgggagcctcggcagcttcggcggcggcagcctcctcggcctcctcggcctctttggcagcagctgcggcagctgcctgcttctcggcgatggcctttgcgcgctcctccttgatcttggcttcggcagccaggcgtgctttctcggccgacttggcatccgtggcgagcttgttgctcttggcctcgatcttgccggccttctcgctcagccatttgttgaagcgggcttcggcttcggtctccgagaatgcgcccttggcgacaccgcctaacaggtgcttcttgtataatacgcccttgtacgagaggatggcccgacaagtatccgtaggttgtgcgcctttctgtaaccaacccaatgctttctcgaagtcgaggtcgatcgtagcaggattcgtgttggggttgtaggttcccaacttttcgatgaatttaccatcacgtggcgctctgctatctgcggcaacgatgtggtagaaagcaaaacctttcttaccgtggcgtgccagacgaattttaacagccatttgctataaaattttgttgtaattaattaaaaaacgctcacccactttgggcttttaagcctgcaaatgtagacaaaatattccgcccggcaaaataattcgccgaaaaatcggtgcgacaggctgtttttctgccggatacggtgcatggcgggttgcggcgggaactgccggaaaaagggcgggcttgtggctgtgcagggtcgtgcccctaaccgggttcccgcggggttgcaggccgttgcacccctgcgggaagtgatatttttcgttcagccgggggctgttgtgaaaaaaattcctatctttgcggcgcaaatcgtcaccgcagggtgcggttttgccgatggttccgtagctcagttggatagagcagcagccttctaagctgcgggtcgcgcgttcgaaccgcgccggaatcacccggaaaagggagcgctggaatcgaatccgggctcccttttcgttttcccgcccgcatcttccttcgccgggtttggcgtcctgcggactttttcgtaaatttgggtcgaatccgatattttcaggcatggaaccgctaccgggctgcaacataaagtatctcaacatcagccgcaacgacgaggcgtgggggctggtcgtcacgacggccgggtaccaggcggtcgcggcgcacagttcctacccgcaggcgcagcatcccgaatcccatattttcgaccccggcaaggggcgtgtcctgaaggagtaccagttggtctacatatcgcgcggggaaggctatttcgagtcccgttcgtgccgccgccagcggatcagggccgggacgatgatcctgctcttccccggggagtggcatacctacgagcccgacagggctaccgggtggttcgaacattgggtgggattccggggcggcagcgtcgatgcgcaggtcgccaacgggttcttttcgccgcgcaacccgcttttcgggctgggattcagccagacgatcatcggcatgtacgaggaggtcgtcggctatgcgctccgggaacaggccggttaccagcaggtcgcggcggggatcgtgcagttcctgctgggttcggtctactacaagcaccggaaccttctgttcaacgactcgatggccatccgcaagatcgacgaggcgcgcgccctcatcaaacgcgaggtcgagggcggtctcacgccgcaggggatcgccgaacgcctgtcggtcagctattcgtggttccgcaagatgttccggcagtatgccggtgcctcgcctgcgcaatatctctcgcagattcggttcctgcgtgccaaagagctactcgatacgacggagctcaccgtcgcggagatcgcatacaggctccggttcgagaccccgagccacttttccacattcttccgcaaaagggagggcgtcccgccccagcagtatcgccgcgagcggaggcagcccgggcggtaacctcctcagcagacgaccgtcaccgggattccgagcagcgcggcgtatttgcggatcgctccggcgacatgtcccacaccgatggcgcagtggtgcgaaggtcccgccttgctccagcggtcgatgaattcccgcgcgggaagcgggaacctgtaacggctgttgatgttgccgatgttcagcacggggcccggcaccgattcgccttcggccagcaggaacgaaatcccgtcgcgtccttcgaccaccgacaggagcgtcaccgggccgtgtttcacggacatctggatcgacagccccttgccgggtttgccgtggtaaacgggaagcggcaccaggcgggctttctcttcgccgagcaggaagtgcgccgggccgtcgtgccccagcaggatgacgtcgtcggtgaagtccatgccgtagaattccgagaaacagcccccggcacccagcagcgacatgattttcatggcctgcacgttcttcacctcgtattcgcccgcgacggggatgccgcgccccgtcagcagggtgttgccggcgatgaccgaagtgacgatgtcctcgtaggcgttgcccgccgcccccgcgtagtagtaggccagggaacccagccggtgcgcctcggcgagcttgtccagcgctacggaagtgcgtgcggcgcgctcgagttcctcccgcgtgcagccctcgtcgatgacgaacgcctcgccgaacgcggcgaccctcgcgtcggcctcgcgctgcgtcaccgagcggcggaattcgtgcagttcgcacatctccaggatttcggcatgggtgccgaagacggtgctctgcagcctgaggtcggagtagacgtcgaccatgccgccgtagtagttgcccagcagtcccatgcggttgcggcgcatgccgcaggcgaccttcgccgcgtcgatccacccgtagatctcggcccaggcctgcgcgtcgtcgaggtagcccgtcaccacgtcgtatttggtgccggcgcggttgaataccgaacagaattcgggcagcgaacaggcctggcagttggcaagccactcgcccgtcatctccccgcggtcggacatgccgttgaggcgggcgtagtcgatggccggggcgggttgcaggttgagcagcacgaccgggatgccctccccgaggaaggggatgagcgtggacgaaagggcgtaggtcgagatgaagatgaacagcacttcggcttcgtcgcgcctgaaaagggccgcggctgcgtgagccttgtccacgtcgtcgaccatgcctgcgtcggcgacgatctgcccgccgtaggcttccattttttcctttatggcgttccggtagccgtcgagcctttcgcgcagtccgccgaactggtgccagtaggtgttcagccctactgcgatcaatcctattttcatggtttgtgatccgttattttgtcatgacgatttcgaaatcttccagcaggccgtagtcccgctggtcatagtcgctgccgggcagctgtttgggcacattgttccagtgccacgggcctgcgatgcccttgtcggcgctgtaatgggggccgaagaggtttttcaggctgcccaccacatgcacttcgacgcggttgcgtcccttgcgcaggtagggcgtgaggtcgaacgcatagggctgccaggcgatgatgcccgctttgcggccgttcacgcagacccgtgcgagcgtcccttcccaggctctcagccggagcgtgtagccggccgcggggtcgtcgatgtcgtagtcccggccgtaggccatgtcccacgaatagaaggggagcccctgccgtttccagcttcccaaggccggtttcccggcgggttcgcggacgatccatcccgccccggccgattcgagcgcgaagtcgccgaaaaggtagacgggggctatttcggcatagatgctcatgggcgagacgctcagttcgacggtgttcgttccccgccgcaccagattgcctacggggtagatcccgaagcggctgtcgagcagcgtgtcgggcgccgcggcttcgacgggcgtgccgttgaacttcacgttccagatgccgggttgttcggcgaccagcttcatgccgcgcgtgtcgaagtccccggccacgacgaagtggtagcttacgcggatgtcgcccgtggtcagcgtgtcgcgttcgacgatagtctgcctgtactggatggccgagtcccacgggttgcctgtcccgtagcaatggttgaagagtttgttgcacgcctcgaacgtgtagaggttgcgctcggtgcgcccgtcgaccgtcaggtcgcagaaatcgaggttgaggacgttgtccttcaggcgggtgacctccagcgggccggcgggctccagcttgacgctctctgccgtgggacgctcggtgccggatgccgcccgggaggtgcgtgcaagggcgctccggcccgaagccggggcgaagagcaggagactcccggcgggcggtaggctgaagtccgccccgacactcttcccgtcggcggtgtgcgggtagggacgcatgtcgcccgtgacggcgtccagctcgaccagctccccggccgggaggccgacgctgcccgtggcggtgtcgcttagcgaggagttgaccaggaacaggagctccccgtcctcgtagctgcgccgctggtggtagaggtcgttgcccctgacgttgtaaaaacggatcctgtcgtctgcgaacgattcggcgattgccttaccgtccagagccgtgtaacggcgtatccgggaggcgttgcggtcgaggaaatccgccagttcggggctgggccgcccgtcgacgagcgtcggttgggcaaagagcaccagttgcccgcccgcctcgacgaattggcggatgaggctgaaagtcccggcgttgaggttctcggtcatgggcgggatcacgaccttcgcataggcgcgttttccgacgacgaatttaccgcccctgaccgaaccgcggtccttgatgatgtgctccgagcccaggtcgtattccgcctgcgccttttcgagcgtggtgacgaaacgctggaatgcgctgccgatctccatgcagcgggggtcgttcatgacataggagtagtagagccagatcgtcgtggttggttccaggacgaggatgtcgttcatctgttcgccctggctgagcacgagtgacaggcgggcgaagtagtcgttcagcaccttgtagtcctcccaccatggcgagaggcgggtgaagaccgggggatagtcgtatttgcgggcgccggcgatggtcatgtgcgagaggtgctggttcatgaaattcacgcccagcgcatattcccagtcgcccagccgcttgaagtcgcggaacgtctcgtcccagcccccgccgccgtaggtttcgctcagcgtgcgtacgcaccccgtctggttggcggcgctgcgcagctccttcacggcgcggacgttgccgaactgcgcctgcgggctctggtcgttgtactggttgaagagcatgtcgatggcgggcatctggtgccacgcgtacatggccatattgtcgccgccctggtacatgctcggccagtcgtgctcccagtagtgccccgtccaaagcatgcccttgcggtcgcaataggccgacatgggcttcgcccagcggtctacgaacatttgcgtcagcgtttcgaggtagttgtggcgtacctgtttccagtcgcccgtttgctcggagagcaggggcagcgaagttgccaggtcgtagccccactgtttgcggaacacttcgaacaggtcgggcgtccagcgcacgccgcccgaactgggaatgcacggttcgtcggagaaaagccccttgatgaccgggcccagctccttgccgaaggtcttttcgtaaccttccatggtgatgccgaggaacttttcggtgacgccctcgaccaagaggtcgacgtacgagtaacccccgtgccagcccgaacggccgtaataggtcttttcgtaaaggtagtattcgcccgggacgtctttgtagcggcccgtgtcggcggtgatgtcgcggaacgtgccgccctcctttttcaggcagaggaagtattttcccgcatcggccgggggcagtgcggttttggtgagcgcgagcccctggccctggtcgtaggattcgggcatctgtgcaggaacatgtccgcctgcgaagccgctcgggtaggagttttcgtcgtagatccagatgtcgagccccagttctttccccttttccacactgtatttataaaggtcgaaccattcgtcggagaggtattcggtgaccagccccggccgcgggtggacgaaggcgccgccgaagccctgcgccttgaagtcgcccagcatccggtcgatgtcggcgcgggtgacccgcgtgttccagacccacaggggcgccgggcggaatgcccgcgggggatcggcgaattcctttcggagcttctcgaatttcatttcccgtttctggggggctgcggcgtagctggcgaggcacgatgccgccagggcggccgccagcaggcttttgattgcggagggtttggttttcatggtcgttccggattgtgtttgctttacaaaggtaaaggttatgcgcttcgggcggtaacgaatcctgataaacgacttttcatttctgataaagcgtgcggaggatggcgcgggcgaaccgagaggttcggggcgggatgcggagcagggagagacggtatggccgggatgctgccgggccgggcaggcgggatcgttaggaacgggggactgtggaatcggggaatcagagggccggggatccggcagaacggtgggggcgctgaaagccggcggaaaaaacacggcgagccggggacgggtgccccgcacggccgggcagcgggtgtggggcagcggatgcaggcggggttacctgcgcggcaggatggcgacgatgcgcgtcccgcccgtgtatccggagtcgatgtatatctccccgtgcaggtgggtgacgatcaggcggcagaggtagagcccgaggccgttgccctggctgaaggggtcgagtttggtgaaacgctcgaagacatagccgtgcttctcgggcgggatgccgcagcccgtgtcggcgacggcgacgaagacgcggtcgtcgcccagacggtcgcattcgaggctgatcgtgccttcctgcgtgaatttataggcgttgccgagcagtgccgagatgagtatcgtcaggtatttgtcgctggtgttgagcgcaatctccgcgaccgggatcgcgcctttgtaaacgatgccaggcttggggtacctcaccttcatgatccgcagttgcgcctggcatacggcgcagaggttcgtatactggcacggcagcggcgcgtgcaggttttcgaggtaggccacctctagcatgtcgtcgaacaggaatcgcagctggcggcggttgtcccggatgatttcgcagtattgggcgcgcgactccggggtgatctcctcggcgcagagcagctcggagaatcccatgatgcagttgagcggcgtacgcacttcgtggcagaccgagttgacgaatgcggcctttttgagttcgctttcgtgggcgtgcttcgtttgcaggagtaactccttctgcagtcgccgggtacggcggttgccgacatagatcgcaccgacgaccgcagcgatcaccagcagtgccagcgaaacgtaggccagggcagttttgtggtggtgggccgtaagcagcgccgcgtcgagcgccatccggtcgagttcgtacgactcctgcttctcgcggatgactttgctctgttcgagccgcagcagcgaatcccgtaccttcacggcacgggcataggccatgcaggcctcggagtcgcggtgcagcctgcggaacatgtccgcccgttccttgtagcaatccgtgaagtgcacgccggccacggggtggtgttcggcggtgcggatcagcgaatccgagaaggccagggccctggcgtactccccgtgcccgacggcatcgagataaccttcgcggtagtggcgcatgcgggcgaagtggagccggtcggcctggtgcgtacggatgaacctgctttgcaggaaaaggtgcatgccgggcgtacccccgaattcgttgtcgccctcgggttgcagcggctgcgccgttgcggcgcagaaaaccgcgagcgccaggcatattgccgggaagagtatcggtcggcgcgtgctcatggcttggcggggattgtgaagatgaaacgtgcaccggcggtatatgcctcgtcgagggatatgttgcccgagaggtgccgggcgatcaggcggcataaagcgaggctcagccccggcgtcgccttcgaatcgtcggagggcatgccgaagatgtcgttgcgtttttcgggcgggatgccgcagcccgtgtcggtcaccgtaacccgcagttggttgtggcgcgggtctatttcatagcggagcgtgacggagccttcccgggtgaatttgcgggcgttgtcgagcagcgcgcgcaccacgaacgaaaagtatttggcgtgtgtacggacggtggccgggttctccggggcttcgatcgtgaaggccaccccgggattgcagctaagccgcgaagcggcgagcagttcggcgcggcacacttcgtcgatgttggtttcctccagccgcagggcctcggtcaggctgtcgaggttggcggcttcgagcatgttgtcgagcgccgaaagcagcaggtcggcgttgacgcggatggattcgcagcaggcgttccgctcggcagcgtcgatgtccgacagcatcagacgcgaggctgcggtgtcgatggcgtcgaatgcggggccgatgccgcggcagatcgtgtttacgaagaccgatttcatgtgttcgctctcctgggccttgcggctgtggcggaggatgtcggccttcagcctgcggttgcgcagcagcgaccgcaggaggtagatccccgtgccggacatcagcagcacgatgaccacgatcgagaggctcgtggcggcgcggttacggatcagggcccgcgtttcggccagcttgcgcttgtccaggtcgtgttgccggcggatcgtttcgaggcgttcgcggcgttcggcggtgaggatcgaatcctgcacctgcatcgtgtgctcgaaggcctcgaaagcctccgggtaacgcttggccttggtgagcaggatgctgcggtcgcggtaggcctggtagaccttgttgggcagcatgctgaaatagcccttgccactctcgatcaggcggatcagcgaatcggaatactggatgctttcggcataggcgccggtgttggctttccagaggtagcccatttcgtagaggtaacttttgttgcgcagcaggttttccccttcggccgcgagcatacggctgcggaactcgttgaagtaccgggcggcgtagtcgttgcggcggatattgagcgcacattgcatcagctgctggtaaggccgcacgtagctgttgtccttatagaggtaggggcgccgcccgagggtactgtcggcggaatagtagcggtcgagcagtgcgatctggtcgttggtgagcgcgacctgttcgtcgtagcggtagctttggttgtaggcgccgctcagcacgtagtaaatgatgctggcgaagcacctgcggatattgaggttcggcatttgctccgtcagctcgtaggcttcgcgccacgtgtcggtctgtgggatataggcccgccggtttccgccctcgtggtagcagagcgtgaggttggcgtagccgcgcaggagcaggcgtttggtgcgctggtagatgttctcgggctcttcgggcggggtgttgctccagtcgtaaacctcatgtgccagcctgaggttctccgcaaggtcgtactggtgccccaggcggtagaacccgatgcacatttcggcataggcgtcggcaccctcttcgggggtgccgggagtcaggtcgcggagcgcctgtacgtaatagcggagcgtatcttccttttcgacatagatcgaataccggctgaggatcgggatgacggacaccgacatggcgtaggtgtcgcggatgtccgccgcttcgcggaaaagctggatggaataggggaggttgaggtgcgtgtcctcgttcaggtctttgaggttgagcagtaactgcacccgttcgcggggatcggacgtatgcgccagcctgccctggaggctgtccgtgacggaggacggcgcggccataagagatacgcctgcgccgaagacgacgcagtagatgcatgtaagcaggcggacaggggacatgtgggtgtaacgcaaaattgggactaaggtagtaaaaaaaaacgggccggacaaaaagtccggctccgttctgtggaaaattatgcgagaccttatgcctttttcaggctcatatccagatacattttcagttccctgggcattaccggcttggtaataaagccgttgcatcctgcttcctcggcgatgcggcgatccgtatcgaaggcataggcggtctgcatgatgacgggtagctgggtggtatgccggcgtatctccttgagcgcctcgataccgtccattacaggcattttgatgtccatcaacacggcatcggggtgacgctccaatgcataatcgacggcctccttgccatttttcgcccatagcagctcatactcttttttgagtattatttccagcaatttgtaattgctttcaacgtcttccgcaataagtatcagcggcttacgtgcgtcgggattgttatctgtcattgtttttacagttgggacgagtgcaaatataaaaaaattttccggaaaacaaataggattaccggcgaattgttccttcccagcaggccgtgttgccgcaggcgtcggtcagggtgagccggacgctgtggcttttgcgggccgggggttcctcgaacaggtggatcagcgtgccctgcatcgggaggcggtcgcagggaacccatttgccgtcgatgagcagggtgcaggaggcgatgcccgagaagttgtcgcccacgcggaagcgcatgcccgaagcgcgtgtgaggtctgccccttcggtgaagagcgggcggatgcgcagcgggatggtgtcggccacgacgaacagttctccggtggtgcgggtcgtggccgtgacggcaccgtcggcgtatttcccgccgatgcaggtaaggcgccccttgacgttgcgggcggccagcaccgtgtggggttgcaggttttcggggacgaacgcccgcacgctgaccgtcatcgcccggtgcagcggcgtggtggccgggaggatgcggtagccgggcgagaggacgatgagcgtcgaatccgaggccggggcggggcagcgttccgcgcggcagaaaaccggttcgtagagcgctccggcggggatgcgtgccgtgacttcgcgcccgaggcggacgatgcccgtccgctcgggggtgagcgccgtggcggcgctgtcggcttcggcacggaagcttgccgtccggccgaggatgtcgaattccagctgcgagcgattgccgcagtcgtcccatgcctcgatgcggatgcggcgggtctgtcccgcttcggtgcggacgattccgcgctcctccatgacggggtagaaacaggcgggggattgggccagctgcgcagcgcggatcacctcgttgcgcgaggtgagttgcagcgggtagtagctcacggcatcgcagcagcgcgattgcgcttgctcgaaaccgtccatgcggtattcgaaaaggggcttgccgtcggccgacagggcgaggcgccacaggccgaaggtgttgcccacgccgttgcggcggtcgctggcctcgacgacgaagtagcctttgcgccccgtgccgacgggctcttcgcgcgtcaggcggtagctgcccccggcgctgcggacgacggcataactctccgggcggctgtgcacggggatgccctgcacggtgtcgacttcaatgtagtggatccgcatgatgcgcggcgggaggtcgtcgtcggggcggatgatcccggcgcttacgacgttgtaaagccgctgcgtgcgggtgtcgcgcagttcgtagtggaggtgcggccccatcgacgagccgctgttgcccgaataaccgatcacgtcgccctgcttcacgggccaggtgtcggggccgaaccagaggtttatgctgttcgagcggcgggcgtggcgctcttcgcgcacgcgctcctcgatgtccttgcggaagcgttgcaggtggccgtagacggccgtcgtgccgttgtgcagcgtgaggtagacggcgcgcccgtagccgtaggcgcccaggcttacgcgcgagacgtagccgtcggccacggccacgaggggtttgccctcggcaccgtcggtcttgatgtcgatgcccgcgtggaaatgcgccgggcgcatctcgccgaaattggccgagtagagcccttcgacgtcgcggatcgggtatatgtactcctccggggcggggtgttgtccccgggccccgaggcaggcggcggccaatatcagcagtgtcagaattcgtcgcatgtctccgtgtccgtcacgagccccgaggcggcctccacgaccgtttcgtagtcgtagcccagcgaaagcccgtaacgtatcagtttggttttcagttcgtattgtgtcgaatatttcgccgttcgtgccttccgttccagttgccggcgcaggcgttcgcccatcgccgggcggtcggcttcggcgagtgccgcgtcgatcagcgcccggtcgatgcgcttgcgttgcagggccgtgcggatcttgtattcgccccagccgctcagccgcagtttttcgcgcacgaaagccccggcgtaacgggcatcgtcgatgaagcggtcgcggacgagtttggccagcaccccctcggcgtcgcgttccgcgagtccccagccgcgcatcagccgccgggcgtcctcctgcgatttttcggcgcgggcgcagagccgcatgagcgcagcgagtgcctgctcgggtgtcttgaccttctttttccttatttcatccggctgcataccatgcggggttttccgttgaggtcttcgcgcacctcggtgtccgtatatccctcctcgccgagcaggaggcgcatctgcccggccgagcgttcgtagatctcgaaatagagcttcccgccggggcggagcatccgccgcccggcgcgggcgatggcgcggtagaatcgcagtgcgtcgtcgtcggggacgaacagcgcctcggggggttcgtacccgcggacgttggcgtgcattgccgcaaggtcgctttgcggcacgtagggcgggttcgagacgatcgcgtcgaacggccccgggaaggcttcgtccaggccgccgagcgcatccgccttgcggagtgtgacccgggcgccgagcgtgcggcagttctcggcggcgatcgccagcgccgcgtccgacaggtcggccgcgcaaacctcggctccgggcagcgcgagcgccaggctcgcggcgatgcagccgctgccggtgcccacgtcgagcagggcacgggccctgcgttcgtcgtgtaccacccaggagaccagctcctcggtttcggggcgggggatcagcaccccttcgcgtacggtgaagcagtgcccgtaaaattccgtgtgccccaccacgtattgcacgggacggccggcggcgagttgtgcggccatcgcttcgaacccgtcggctgccatcggtgcgccggggtcggtcagcaaggccgataggggaagccccgccaattcggcgagggcgatcagggcgatgctccgtgcctcgcgggcgtcgtaaagtcccgtgagacgggctgtgagtttgtcgaggagcccgcggcgggtggtgccctccggtgccgcctgcgagggcgggttgccgtggccttctgccgcgtccagcggctgcggggcgtatggggcgggggtttcgggggcggacatcagtgccggatgaaattggccagcgcgatggctacggcggcttcgacgaccacggccccgcgcagggcgacgcagacatcgtggcggccgcggatcgtgagcggctcgaccttgtccgtcgccaggttgtaggtattctgttcgcgcccgatgcttggggtcggcttgaccgccgcgcgtaccacgatctcgttgccgttggtgatcccgccgttgatgccgcccgcattgttggtcgcagtggtgccttcgacgtcgagcagcgggtcgttgttctgcgaaccgcgcatgcgcgccccggcgaagccgctgccgaattcgacccccttgacggccgggacggcgaacaacaggtgggcgatcaggctttcggccgaatcgaagaagggttgtcccagtcccagcgggacgccctgtacgcggcattcgatgattccgccgaccgaatcccggtcggccgccgccgcgcgcagcacctcgtcgaagcgcgcagggtcggtgcatccgccgatctcggtgatgcgcgtgtcgaaggcgatgcccggcgggagcatcttcttggcgacgacgcccgcggcgacgaacgccacggtcaggcgtgccgagaaatggccgccgccccgcgggtcgttgaacccgttgaagcggtggtaggccaccaggtcggcgtgcgaaggccggtagtggcgggctacggtggcgtaatcctgcgaatgggtgtcggtgttggcgaattcgatggtgagcggcgcccccgtcgtcatgccgttgtaaagccccgatacgatctgcgggatgtccggctcgcggcgcggcgtggtgccgcgggccccgctgcggcggcgtgcgaggtcggcttcgaaatcttccgccgagagcggaatacctgcgggaaccccgtcgatcgagataccgatctgcgggccgtgcgactcgccccagatggcgagcctgaaattgtgtccgaaaatattcatggcgttcagattctgattttttccaggtcttcgaagaatccggggtagctcttggctacgcattcggcgccttcgatggtcatttccccgtcgcagagcagtcctgcgacggccatcgacatggccatgcggtggtcgccgtggctctgcacgcgggcctggcggattctgccgccgcggatgcgcatgatgtcctcctgggaggtgtccacctcgatgcccgccttggcgtactcttcgcggatggcgtccgcacggttgcactccttgtgttcgagccgcgaggtgccgcggatgacgctctcgccctgggccgccgccgcgagcgctgcgagtgccgggaaaaggtcggggcagtgcgtggcgtcgaattcgaaggcgcgcaggggacggtgcgaggccgtcacggagtcctcgtcgttgatgaccgcggccccggcccgcacgagtgccgtgcagatggccgtgtcggcctgcttcgaaagcatggagacgttcttcacggtgacttcgcccgcgacggcgcccgccacgagcagcatggctgcggcgctccagtccccctcgatgctgaaaaaggccgggcggtagcgctgtccgccctcgatgtagaactccttgtagtcgttatggcagatctccacgccgaagcgtgccgccgtgtcgacggtcatgtccagatagggggtcgagacggcgctgcggacgtggagcgtggtgtcgtgctgcgagagcgggagcgccagcagcagccccgtgatgaactgcgacgaaaccgagccgtcgacgtcgatctccccgccccggatcgggccgcgcacttcgaagggcaggtaaccgtcgttgtcccgtacccggacgccgaggcggcgcagcgggtcgatcatcatgtgcatgggacgccgtagcagggtgccctggccttcgatggtgacgggcatcccgcagagcgaggcgatgggggtgaaaagccgtgtggcgagccccgattcgccgacgtgcagcaccttcccgcggggatgcagcccgccttcgatcgaaagggtcgaggcgtccacgtgctttacgcgggcgccgagcgtctcgatgcaccgcagcgccgagcgcgtgtcgtcgcagaattccaggttgcgcagcaccgaggtctccccgcagaggagcgatgccgccagggcacgctgtgcatagcttttcgaacagggcggcgtcagcgtgcctttaacgcggcccaatggaaccgtcttgtccattgtgtaggttatatgcttttatgggcaccggggttggccggcaccctgaaattaaaatcctcgcctctattcctgtgtttcggtctcctccccggcctgctgcgcctgctgtcccttgcggtttttcatctgctgggtcagctggtggctcttcttgagctcgaaatgctggcccaggtagaccttgcgaaccatcgggtcggcggccagttcctcggccgtacccgtcttgaggatcttgccctcgtagagcaggtaggtgcggtcggtgatggccagcgtctcgtcgacgttgtggtcggtgatgatgacgccgatgttcttgtgcttgagcgtcgccacgatcgactggatgtcctccacggcgatggggtcgacgcccgcgaagggctcgtcgagcaggatgaacgccgggttgatggccaccgcgcgcgcgatctccgtacggcgccgttcgccgcccgaaagctggatgccgaggctcttgcgaaccttttgcaggcggaactcctcgatcagcgactcgacgcgctcggtctggtactccttcgagaaatcggtcatttcgagtacggcgcggatgttgtcctcgaccgacaggcggcggaagaccgatgcctcctgtgccaggtagcccacgcccatctgggcgcgtttgtagaccggctccttggtcagttcggcgaccttgccttcgtcgtcctcgaggaagatgcgcccctcgttgggcttgataagtcccacgatcatgtagaaagtcgtggtcttgccggctccgttggggccgagcagtccgacgatctccccctggttgacgtcgatcgagacgtggtcgacgacggtgcgggccttatattttttgacaagttcgctggtgtataggcgcattgcgttctctcgctataaaatttttacaaagttatgcttttttccgaaaagttttttaactttacattgaaatttctgattttagagtagaaacggcgaaatgaaacaatttgaatcgtccctgttgcatgacaagctgaaggagtacttcggcttttcgtcgttcaaagggaaccaggaagcggtgatccgcaatgtgctggaggggaaggatacgttcgtgctgatgcctacgggcggcgggaaatccctctgctatcagcttccggccatgctcatggagggcgtggcgatcgtcatttcccccctgatcgcgctgatgaagaaccaggtggacgccatgcgcaccttctcggccgagtcgggcatcgcccatttcctcaattcgtcgctcaacaagacggccgtcgcgcaggtgcgcgccgacgtgctggccgggaagacgaaattgctctatttcgcccccgaatcgctgaccaaggaggacaacgtggccttcctgcataagataaaggtatcgttctacgccatcgacgaggcgcactgcatttcggagtggggacacgacttccggcccgagtaccgccgcatccgcccgatcatcaacgaaatcggcgctgcgccgctgatcgccctgacggcgacggcgacgcccaaggtgcagctggacatccagaagaacctcggcatgtccgacgcctcggtgttcaagtcgtcgttcaaccggccgaacctctattacgagatacgccccaagggggacgtcgaccgcgatatcatccgcttcatcaagcagaacgagggaaagagcggcatcatctactgcctgagccgcaagaaggtcgaggagctgaccgaactgctcgtggccaacggtatccgcgcgctggcctaccatgcgggcatggacgccgcgacacgcgccgccaaccaggacgacttcctgatggagcgggtcgaggtgatcgtcgccacgatcgctttcggcatgggcatcgacaagcccgacgtgcgctatgtcatccattacgacatccccaagtcgctcgaaggctattaccaggagacggggcgtgccggccgcgacggcggcgaaggttactgccttaccttttatagttacaaggacatccagaagctagagaaattcatgcagggcaaacccatcgccgaacaggagatcggcaagctgctgctgctggagacggtgtcctatgccgagagttcgatgtgccgccgcaagacgctgctgcactatttcggcgaggagtataccgaggagaactgcggcaactgcgacaattgccggaatcccaagccgaagatcgacgcgcgggcggcgctcaagatggcgctcgaggcgctgcgcgacatcggcgacaagttcaaggccgactacctgataaacgtgctcacgggcaagaccacggcgctcatcaagagctacggccacaacaagagcaagtggttcggggcgggtgccgagcacgacgcgcgtttctggggcgccgtgctgcgccaggcgctgatcctggggctggtggacaagaatatcgagaattacgggctgatctcggtgaaccgcaagggcgagaatttcatcgccatgcccttccccgtcaccgtgacgctcgaccacgactatgacgaggaggagaaggaggccgaggccgtcgtcccgatgggcaagggcggcgcggcggacgaggaactctttgcgatgctcaaggatttgcgcaagaaagtggccaagcagcacgggctgccgccgttcgtcatcttccaggatccgtcgctcgaggacatggccgtgcagtacccgatcaccatcgaggagatgcaaaacatcaccggcgtgggggtgggcaaggcccgcaagttcggcgaggagttcatcaagctcatcaaggcctatgtcgaggagaaggagatcatccgtccgcaggacatgatcgtcaagtcggtcggcaacaagtcgggcaacaagatcttcatcatccagtccatcgaccggaagatggatttcgaggacatcgcccgtgccaaagacctcgatttcgacgaactgctgaccgagatcgaaggcatcgtcaactcgggtacgaagctcgacatctcgtactatctgagggactttatggacgaggacaagatcgaggacatttacctctatttcaaggaggacgcccagagcgattcgctcgatgcggccatcgacgaactgggggccgactatacggaggaggagatacgtctggtgcgtatcaaattcatctgcgagcagggcaactgacgccctctgtacacctgccatcccacggctgttgcgtcactgttccgaggattgacactaacttaataatacgcctatgaacaaaaagacttttactgttgccgtgattttcatgatcgtgacgctcgtgtggctcggagtcaatatattctgggccttgtcgaacagcaattgtatattcgacctcgtcgtggccgtattgttcgtgcttgcaggcgttgggatggtgtataacgaatgccacaagcgcaagcgcaagcacctcgacgaggtgaacaaatacaaaataccgtaacctatgtgtgccatgcaacggttcctgacgatcatgtccgtgtttttcttcgtgtgcggcgtcgtttcgctgtggcggatactgtccgacgacgggcgggatatctggtacgtgccgctcgtactgatcggtgcgtcggggattctggccgtccgcgcccggagcatgggccgcaaaaatacgcaaaacgaagactgatatgaaaaccaatgtgatgcagatagtccgcctcgtgatgatgatcgtggcggtggccgggataatctacgccctggagtatatggagcgcggcattgccgtgtggttctggatcacgctgctcggcgtgggtttcgtggggctgctctatacgttccgcctgacgcaacgccgcgtgcggctcgaacgccgtgcccgggagcggcaggaaaagaaaaaatcccgccggtcgaaacgctgaccttcatccgccggacatcgttgcccggcggttccgttcgcggttccgtccggggatccgttcgcgggtacggcgggcggggcacgctgcggatggtggggcggaacgttgccggggtaaaggtggtgagatggtaatttacaaggacgatattctgatgctgcgcacatggcgcgcggcggatgcggcgtcgctggcggccaatgccgacgacatcacgctgtggaacaacgtgcgtgaccttttcccgcatccctatacgttggcggacgcccgggagttcattgccgcggcggccgggaaaccctgcccggtggatttcgccgtcgtggcaggcggcaaggccgtgggcggcgtggggttcgtgcccgggacggatgtcgaacgcttcggcgccgaaatcggcttctggctcggaagccgctgccgggggcggggcatgatgacggcggccgtccggcaggccgtggagtggatgttcgcaaataccccgataattcgtatctttgccgcggcttatgccaccaatcccgcatcgcagcgggtgttggtgaaaaccgggttccggcatgtcgggacgttccgcaaggcttttttcaagaacggggcgttcgtagacggctgttattacgaattactgaaagacgaagatgagtgaagtaagggcaaaaaaggcgctgggacagcatttcctggtcgacctcaatatcgcgcgcaagatttgcgatgcgctttcggggggcgaaagaccgggggccggggccgcggcggatgcccggacgggtgcggatggatgtgccgatgcggaaacccggacgagggtggctggatatgccggagctggggcagaagcccagacgatggcggctggaagtgccgatgccggggcagaagcccggacgaaggcgacaggaactgccgatgccgatgcggaaacccggaggagtgtagctgcaagtgccgatgcccggctcgcggcggatacggccgctgccggtgcgccggcggccgcgcaagaggaacggggcggcgcagtcccctgcgacgtgctggaggtcggctgcgggatgggggtgctgacgcagtacctgctcaggcgcggcgacattaccacctacggcgccgagatcgacccggagagcgtcgggtacctccatgcgcatttccccgagttcgcaccgcggctgatcgagggcgatttcctgaagatgaacctgcgcgagcgttttccgcggggactgaagatcatcgggaatttcccctacaacatctcctcgcagatatttttcaaggtgcttgagaaccgcgacctggtgcccgaatgcgtcggtatgatccagaaggaggtcgccgtacggatcgcggagcctccggggtcgaaggagtacggcatcctgagcgtgttgttgcaggcttggtatgacatcgaatacctctttacggtcaacgaaacggttttcaacccgcctcccaaggtcaaaagcgccgttatccgcctgcgccgcaacggcgtcggacggctcggctgcgacgaggcgctgttcgtgaaggtggtgaaagcgtcattcggccagcgccgcaagatgatccgcaactcgctgcgggcggtgttcggcgatttcggcggcgcagaacatcccttttttacgcagcgcgccgagcagctctcggtcgccgatttcgtgcagctgaccgactgggtcgcggccaaccggaaataatcgcggcgggtcgtggacgtcggataccgcagtttgggtgcgggttcgagtcgtcggatgccgggcagggaagggcggacagtgtgtactggaggcggaaatggaaaagcaccgggagcccggtgcttttttcatgccgttcggcgggcggggtattgctccgcagccgcaatgcgcaggcgtctattttctcaggtctcccgcaatgaccgtcaccagttcttcgcgggagaggtatttccgagccagttgctgcacgtcggccggcgtcatggcctgtatgcggcggatgttctcgttgatgacggtatggtcgcggccgcagaggatgttctcgatcgtaacgtcggcaatgccgaacggcccgtcgaggatacgcatcatctcaccgaccataatgttcttcacgagcgaaagttcgccctcgggcatcggctcggcgcgcaaccgttcgatttcggcgtaaatctcgcgcagggcctcctgcgtgacctccgtcccgacctgtgccgctacggcgaaatagccctcccgttcgaagttgaccatggcggccaccacgccgtacgtatagccgtgctcctcgcgcaggttctgcatcaggcgcgaaccgaaataaccgcccagggcggatgccacgacctgcatgccgaggaaatcgggatgctggcgcgggaaaagcagccttccgatgcggatcgacgactgtacggcgcccggatggtcgacccgcgcttcgtgctgcgtcacgggtgccgggaacgggatgccggcttcgggtttgcgccgcggcaaccgttccgccagcgccgcgacggcctgccgttcgtggtcgccgatgcgcccgctgcatatcgtgaacccgttgtccgccgtgtagtggctttcataaaacgccgctacatccccgcgcgtgagtttatcgtattgggcttcgtcggccgagatgccgtaggggtgcgagggcccgaaaagggcgcgggcgaaagcctcgcgggcctgggtgtcgaccttcgtgcgttctacggccagccgctgcttgcgcttggcgcagtaggtgcgcagttcctcttcggggaaaacggggtgcaggagtatctgttcggctacggcgagcgtttcgtcgaagaatttggagagcgtgcagaagctgatgtaggcatagtcgcggtcgatgttgacgtcgtagtacgagccgtagtaatcgagccgttcggcgatctggtgcgccgtcatgtcgcgcgtcccctcggcgagcatgttggcggcggccgatgccgagaagggaacccgctgcatggccgagccggcgcggaacacgaaggtgatgcgcagcacttcgaagtcgtcagaggcgagcgtgtagagcgccgagccgtttgccagcaggctcttcccggcttgtgcgacctcgacgtcggagggtattacgaggggtggttgtgtcattttttcgctttgtaaataagggtggaacagttttcggggcggaaggtgcggcggctgaaggcgaggatgtcgccggtcgtgacggcacggtaggccgcgacctcgccgttgactaacggcaggtcgcccagcatctcgtagaagcccaggttcatcgccttgttcatcacgttcagctcgccgaagagcgtgttggcctcgaacttgtttttgaccttctcgacctcgtagtccgatgccgggatgctttgtaatgcttcgatttcggcacggaaagccgcttcggcctgttcgggagcggtgcccggcagcagttgccccgtaaagacgaacaatcccggatcgatgtcgcccgaaatgtaggcgttgaccgaggccagcaggcgctgttcctgcaccaggtgtttgtagagccgcgacgagtcgccgcccgacaggaggtcggataccaggtcggcggtatagaaatcctgcgaggtgcggctgcccatgtggaaggccatcgacagggtcgtggcgggcacgtcgcgttcgacctcctcccggcgcggcgcctcctgatccggttcccgggggatgggctgggaggccacggtgcggtcggcgagcggggcgaactacttttcggcaaggtcgagcatgcgctcctcgtcgaagtcggccgagatggacaggatggcgttcgaaggatggtaatgggtgcggtagaaggcctgcacgtcgtcgagtgtcgccccggcgatgtggtcgggcgtgagcccgatggtcgcccagcggtaggggtgtactttgtaggccagcgcccgcagcagcatcggctggtcgccgtagggctggttgaggtagcgctggcggaactcctcgatcaccacgcgtttctccgcctcgagttttccgggggtgatgtccagcccctccatgcggtcgctttcgagccacagtgcggtctcgatattgtccttggggagggtgatgtagaaatccgtatagtcgttgttggtgaaggcgttgttgtcgccgcaggccatctgcacgggcaggtcgaaattcggaatttcgcgcgtgccgcggaacatcaggtgttcgaacaggtgggcgaaacccgtgcgcgcggggttctcgttgcgcgccccgaccttatataatatgtttactgcggcgagtttcgaagccttatcccggttgacgacgatagtcaggccgttggccagtgttctcttcttgtattcgatcatggatgcaaagatataaaaaaagcagcggcaggaaaattaagtgacgcctcatttgaagatggattcgaagactatgaagtttggggattgtgaatccattaccctgccgctgcgtgtggaaaacgcttcggcagaaaacgggaagagtggtgccgaacctgtggcccatggctctggtcagcctctatcccacaagtcacagcacgcacccttctgggtacgacctgtattgtgggataacaaaaaatttaccagattttagagccccaatactatcgtttatacacgatgatatgtaaagaacgaattatggaacaaaattaggaaaaaaatcccgatttgcaatccccgcgcccgaacaacctattcataggcctttatttcccagtgtttcgccgcgtaaaatttgttgacggccaaatttttacctatatttttccgccgtgccgcgcccgggagaaaaaatccgccgtttttccggcccgggatttgccctgccggctgggatggcgctccggatgcctgcggggcctgtccggattgcgtcagagggggcgtgccgggtaatccgctatcggataataagttcggcaactcggtgattatccgtgagttcgctgttaaaaaaataacaacgaggttgttattccaataacattccgaatggtgaaaaaaccgggtgatttgtcagaaaatcggactggtttttccgccggaattgttatctttgcaacgcattttgtcccgaatccaggaaaaacacacaatatcatctaaaattttaacaaaatggcagaaaagaaatttatcacttgtgatggtaactacgctgcggcacatgttgcatacatgttctcggaagttgcggcgatctatcccatcacgccgtcgtcgaccatggccgaactcgtggacgagtgggccgcccagggtcgcaagaatattttcggcgaaacggtgaaagttgtcgagatgcagtccgaagccggtgccgcaggcgccgtgcacggttcgctgcagagcggtgccctgacgtcgacgttcaccgcgtcgcagggtttgctgctgatgatccccaatatgtataagatctccggcgaattgctgccgggcgtgttccacgtctcggcgcgtgcgctggccgcacagtcgctgtcgattttcggagaccaccaggacgtcatggccacccgccagaccgggttcgccatgctggccacctcgtcggtacaggaggtgatggatctggcgggcgtggcgcatatcgtgtcgctcaaatcgcgcgtgccgttcctgcacttcttcgacggcttccgtacctcgcacgagatccagaagatcgagctgatcgacgaggccgccctgaccgccatgctcgaccgcgatgcgctggctgagttccgccggcgggcgctcaaccccgagcatcccgtcacccgcggtacggcgcagaaccccgacatctatttccagacccgcgaggccgccaaccgtttctatgacgccgtgcccgacatggttgccgaggcgatgcgcgagatttcgaagatcaccggccgcgagtacaagccgttcgtatactacggggcagaagatgccgagcatgtcgtcgtggcgatgggttcggtgacggaaaccctcagggagacggtcgactacctgaacgcccgtggcgggaaggtgggcgtcgtgacggtacacctctaccgcccgttctcggtgaaatacctgggcgaggtgctgcccgaaacggtgaagcgcatctgcgtgctcgaccgaacgaaggaaccgggtgccaacggcgacccgctctacctggatgtcgtcgaggcattcgccaactgcaaggatattccggccgaccgcaaaccgctcatcatcggcggccgctacggcctttcgtccaaagacaccacgccggcgcagatgctggccgtgttcgccaacctcggggccaacgagcccaagaaccagtttacggtgggcatcgtggacgacgtgaccttccgctcgctgcccgtgggcgaggagatttcgctcgccaagcccggtacgttcgaggcgctgttcttcggcctgggggcggacggtacggtaggcgccaacaagaactcgatcaagatcatcggcggcacgacgaacaaatattgccaggcatacttctcgtacgactcgaagaagtcgggcggttacacctcgtcgcacctgcgtttcggcgacctgccgatcacttcgccctacctggtcaccacgcccgacttcgtggcctgccacgtgccttcgtacgtcgacaagtacgacgtgctgaaagggctgaaagccggcggttcgttcctgctcaactcggtgcacgacgcggctaccacctgcgctacgctgcccgaccatatgaaagcctatctggccaagaacaagatcaatttctatatcatcaacgccacgaagatcgccgccgagcttgggctgggttcgcgtacgaataccatcatgcagtcggcattcttcaagatcgccaacgtcatcccgttcgacaaggctgtcgacgagatgaagcatgccatcctgaaatcctacggcaagaagggcgaggacatcgtcaacatgaactatgcggccgtcgacgccggaggcaacgccgtggtcaaggtcgaggtgccggccgaatgggcgcagatcgacgacaagggcttcgcacacgtctctgacgcttcgtgtcccgaattcgtgcgcaagatcgtcgagccgatcaacgggctgaagggcgacgacctgccggtatcggctttcacgggccgtgaggacggtacgtgggagaacggcacggccgcctacgagaagcgcggcatcgccgtgaatgttcccgagtggaagatcgagaactgtatccagtgcaaccagtgcgcctatgtctgcccgcacgccgtgatccgtccgttcctcgcgacggaggccgaggctgccgcatcgggcgtggaatggaagcaggggctgggcgagaccaaggagtacaagttccgcatccagatctcgccgctcgactgtacgggctgctcgaactgcgtcgacgtctgcccggccaaggagaaggcgctggtaatgcgtcctctggaggagcagatgccccagcagaagaactgggactacatcaccaagcatatcggctacaagcaggtcgtcgacaagaccaagtcggtgaagaacctccagttcgcacagccgctgttcgagttctcgggcgcctgcgccggttgcggcgagaccccctatatcaaggctatctcgcagctgttcggcgacaagatgatggttgccaacgccacgggctgtacctcgatctattcgggttcggcaccgtcgaccccgtactgcaccaacgacaagggccagggcccggcatgggcgaactcgcttttcgaggacaacgccgaattcggcctgggtatgcacctcggtgtcgagaaactccgcgaccgtatccagaatacgatggagcaggctattgccaactgtacgaaatgctccgacgagctgaagggcgtcatgcaggagtggatcgcttcgcgcggttcgtcggccaaatcggccgaggtctcggcgcgcctcgtcccgatgatggaggcctgcggctgcgattactgcaaggatatcctggagatgaaggactggctggtgaagaagtcgcagtggatcatcggcggcgacggctgggggtacgatatcggcttcggcggtgtcgatcacgtgctggcatcgggccaggatgtgaacattctggtcgtggataccgaggtttactcgaataccggcggacagtcgtcgaaatcgacgcccgtgggtgccgtcgccaagttcgcttcggccggcaagcgtatccgcaagaaagacctcggcgccatcgccatgacctacggctacgtatacgtggcgcaggtttcgatcggcgcttcgcagatgcagttgttcaacgtgctcaaggaggccgaggcctatcccggcccgtcgctcgtgatcgcctatgctccgtgtatcaaccacggcatcaagggcggcatgacgcgcacgcagaccgtgggcaaggaggccgtagcctgcggttactggcacctgtggcactacaacccgcagctcgaggagcagggcaagaacccgttcgtgatggactcgaaggagcccgactggtcgaagttccgcgacttcctgatgaaggaggtgcgttacacttcgctcaaaaagtcgttcccggccgaggccgacgagctgttcgcagccgccgaggagaacgccaaatggcgttacaacggctaccagcgccttgcgaagatggaatactaattatattatacgttatgcggagggccgcggcattgtgccgcggccctttttgtatatccggaaaatgcttcgtgatgaaaaaacgcgcgttcgtttttgaaatcccccccccgagtgaatttatttgtccatatagacctgagaggataaatttgcacacatttgaattacaaacaagtatctcacttatgaaaaattttgtgcacaaaattacctgtgtgctcgtcatgtgcgctgccacggtagcgtttacggcatgtagcgacagcgacaacaagggcgacggcccggttaccggtaccctcagtgtggaaaccggcgccctgaaatttacgagcggagcctattcgaagggattcgaggtggaaaccgacggtacggtcggcgcgatccaggtcgatgtgaactacaagggtgccgaaaccggatggatcaccgcgaaagtgaacgacggcgacgtggtggtcaccgtggcgcggaatacgggcgatgcacgtacggcggatgtcgtcctgagcgccaagggcgccgagtcggtgaccgtttccatcagccagaaggccgtgttctcgtcggatctggtgggccggtatacgccctatgttcccgatcccgaaaatccgatcgctaatttcttcatcaaccccgtatatgctgatatggatccggaaaaggtgccgcagatcgacatgggtttccttttccccggatttatcatgcccgttaccaccgtcaccggtctggccaaccagctcgtggggatgatgtatggcggcggcctcacctatttcgatttcaaggacgacgggacgatcggcgcgggttaccgcgacatgctcgggttcgacatgaatgccggccctacgtttggctccgaggtcgaattccccaatgccgagacgctggaggtgctgcctgtcgatgcgattacctattacaccaaggacggcaaggtctatttcgccatcgacaaggagtacctgacctatatcggccaggcggagctcgaaatgaacctgccccagatcatcgacgccctgctggcgcagtatccgggcctggggatcgaagcgaccgacgattactatgccatcccgctcaagtacgcggtcaaggacggcgttacgacgctgaaggtcgacaaggagatgatgatgccttacatgccgctgattacttcgctggtcgatgctttcctccccgacggggatatcgaggtgtcgctcgaccccgaatccgacccgatgaagatcccggcaaaggcgttggtcaactcgttgctcgatgcgctcttcaaccagagccaatccatcgagatcggcatcggccttacgaaataggcggacacgataacaaaccctttccaggcaggttgcggaaactccgcaatctgctttttttcttttgtaatcttgtctgtccgaataatatttcctatttttgctttcggtaacctaaaatgaatcaattatgaagaaaagttttcttttgttggctgcaatgctcctttgctattgtggtacggcattcggctggggcaagtcggggcatgacgccatcgcttatatcgccgagtgcaacctgacgcccaaggccaggaagaacatcgagaaatacctcgacggccgttcgatcgtctattatgcctcgtggatggatgtgtaccgccatacgccggcttacaaggtgacttcgggctggcacggcgatacggtcgacgccgacggaaagtacgttcccaacgcaaagggcgatgcggtgcagtgcatcgaggaggcgatcgccaggctgaaggattaccgcagcctggacgattcgacggtgctggtgtcgatcaaatacctcgtgcacctggtgggcgacatgcattgccccgtgcacgtgaaatacccttggtataagaatttcaagttcgacctgaacgggaggcccagcgaattccatagtttttgggacagcggggtgctcgacctgaaccatcgctgggggtacgtggagtatcgtcaccagttggatcgccttacgaagaagcagattcgtgccgtcgttgccgggacgccccgcgactggctcgaagagagcgcccgggattgccgcgtgatttacgagtggacgaagcccggccagaagtttaccaagaacgaggcccgcgacctgctcaacacggtacatccgttcgccgaggagcaaatcctcaaggcgggctaccgtttggccgccgtgcttaaccaattattcggttaattttgtaattttgcaggcgtgaggcggttttgtgcgattcttgcaggggccgtcatgttattaattcttacaggtacgttatgaaaaagtattttgcagccgcagcgctgctcatgatgatggccgcctgcgggagcgccggccaggacaagaagctcgaaggcacgacatggaaactcgccaggatggaggcgatccctgccgcggccgtcggcaaggaggccgatttcttcaccctggagttcaacgccgccgatacgatggtcgcagggcgtacgaactgcaaccgtttcttcggcaagtatgagctcaaaggcaaggagctcgaactcaaaaacctgggcatgacccgcatggcctgcccagacatgcagtacgaggatgccttcgtcaagatgctcgacgaggtcgaccgattcgagatcaagggggcggagctgaccctcttcgacgaccataaggcactggccgtgttcaaggccgtcgaaaaagagcctgcgaagaaataaacccgtcccgtttaccgggaaatgaaacgggcaggatggtaaatcctgcccgtttctatttgtagccgtaagggtgccgcgctggctcagtcgagagccggcaacagatatttccagatcaggtcgagctgtgtcccgccccgatccgtatattccgtgacgacgaccacggcatcctgccggggggctacgacgatatattgcccgtaggcaccgtctgcccggtaacaaccgtcgagcgaacgccacaactggtatccgtaaccctgggcccattggcttgtggcacgcagtgtggcgacctggtcggccggcgtaccgggactgatgttcgacacctgctcccgggtggcttccccgacccaccatgccgggagaatccgtttgccctcctacatgccgttttgcagcaggagctggccaattttggccatgtcttccgttttcaggaaaagtccccagccgccgcagttgatgccctgcggcgattcctgccatttgatcccgccgatgcccagcgggcggaacaaccggggcgtcagatagtcgcagaccttttggccggagacccgctgtacgattgccgaaagcatgtaggatgcgaggttgttgtatacgaagaccttgccgggtgcatggacgaccgggtaggaaagaaactgtccgacccagtcctcgtcgctcgaacgcaccaggtcgaggcggtcgcggtcgtgcccgcacgacatgctcagcaggtggcgcacctccatatttttcaggttcccgctcaccgagtccggcagcttgtccggaaagaacgaaatgaccttgtcgtcgaggctgagccgtccttcgccgatagcgatggcgacagccagcgaattgacggtcttgctgaccgaatagacgtattggggctttccgggtgcgccttcgtgcatccatctctctgcgaccacgtctccgtggtggagaatcatcaggctgtgctgttcgatcccggctttttctacttcggacaggtactgccgtacggctgccctgagggcggcatccgcctgtcgccggggcagggggtgtccgttttcgcccgcggccgggtactcggccgacggattgactgcatgtgcgcctacgggcagggcgcagacgatgcagaaaagggataaaaggaggagcttattcatgggtagtacgtgttttacaggataaagatagggaaaattatgcaaaaatctggagccggaggtgtttgccgccgagaacggcagggtgccggaaaacacaagcggcctcccgaaaggggaagccgcttgtgggtgtttcttatggaacgtttactcgctcaggggagttacgctcacgtacgatttgcctgcgcctttcttgcagaattcgacggtgccgtctacaagggcgaagagcgtgtggtctttaccgatacccacgttttcaccggggttgtgaaccgtgccgcgctgacgaacgataatgttgcccgcctttgcgaactgcccaccgaatagtttgacgccgagtcgcttgctttccgactcgcggccgttcttcgaactacctacacctttcttgtgtgccatttctcttcagttttaaaggttatgcaacaatttcctcgacaaggacctgtgtcagatactgacggtggccgttgcacttctgatatcccgttctgcgctttttcttgaagaccaggactttgtcgtccttcagatgcttcaggatcttgcacttcaccgaggcgcctttcactacaggtgcacctactttgacctgaccgtcgttgtctgtgagcaggactttgtcgaaacttacggacgaattttcttcgccctgaagacggtggacataaagtttccgacctttctcagctttaaattgctgacctgcaatctctactataacgtacatttaatgcgataatatgtatttgaacataattcggagtgcaaatatacgcatatttattttataagcaacaccccgcacgaatttttttcggcacagtcggctctggcatggtttaggcaggggcgcagcggacggtgccgcatggcgccgcgctggcgcccggcgacggcgggcggcccgcaccggaggttttatcttgcgccgaagctgcccggggtggttcggtgtgaaatagctgttaaaaatttcacaatgtcataaattcttgttacctttaccatggcaaccaaagtttccgaactcaaaaaaagagctacgatgataaacgacaaggtgaggatgtacctgctgccgccgctcatcaatgcggcagtcagggccggtgcctcgataatgaatgtctataaaaacctcgacgattacgatataagcctcaaagacgacaagacgccgatcacgctcgccgaccggctggcgcacaaaaccatccgcgaatacctgggcccgacgcgcatcccgatcctgagcgaggaggggcgcgagatgctctacgacgagcgccgcaactgggagctctactggctggtcgacccgctcgacgggacggtcgaatttatcaaggggaacaatgaatttacggtcaacatcgccctgatggagaacaatgtctgcatgggggcggtgatttacgtgccctatttcgagaagctgtatatcgcggggcgggatgcaggctcgtatgtcaaggagcatgtggcgcccgattccggggcggaatatacctacgatgagatcgtcaccgggtggacgcggctgccgctcgaaagccaggccgtgcgtccgcatccccgcctgcgtgtggccgtgtcgcgctcgcaccagacgcccgagaccgccgagcatatcgcccgcctgcgcgaggcgcaccccgacctggagatcgtcgaacagggcagttcgtataagttctgcctgctggccgaggggcgggtcgactattatgtccgcacgacgcatacctacgagtgggacacggcggccggggagctgatcctcgccgaggccggcggccggacgcgcacgctgcccgacgacggggtgctgcgctacaacgaaaaagacctgcgcaacccgtggttcgtctgccggtcgaagtactgcaagatttgacgccgcagcaatgcggaaccggtaagtcagggcggatttgtttccgccttttttcgtgtgcttgccccgttgtgctgtttttacttggaatagttgcactttcgggcaaaaactgttaatttagatgtgtcaaagcttgcctcccatgaaaaaaatctccctgttctgtatgctgggattgttgctcggcgtatcctgttcgaaggaaaaagtaaagccgcccgccatgaccgatgatacggtggccgtattcggcgatgacgcattcggggcattttgcctgcggacgtacgaccgtaacggggatggtgtacttacggtcggtgaaatcaaaaatgtggtgtcgctggattttgacgataaggatatccggtcgctggacgggatcgaatactttaccggattacagtctttatattgtaaccaatctgccggggggaatctggtgcgactcgatgtcagccggaatgcggaactcaggactttgtgttgtgcggggaacaaactcgaagaactcgttgtggatggtctccggaacctaagccgtgtcgattgtgcggccaataacctggaaaaactcgatttgcaaaatttacctgtgttgacctttttgctttgccggaataaccggctttgcaacctggacttttccgaaactcccggcttgaaatccatagattgtgcgaataacgggatttccgcgcttgatgtgaggccgtgcggggatattactatgatttggtgtgagggcaatgcggggatgcggatctcgctggattggcggcaggcaccgggcatatttggtgacgacgatgtcgttttggaggtggccggagatgaaaaccttgtctttgccgatgcggcggtagaggcggcactggccgcaaggaattttgataagaacggggacgggcggatttcccgccatgaggcggtttatgtccgggagttgttcgataccgattgcagcgggttcgaatccctctctgattttagttatcttatcaatttgtactggtgtgagttggtgtgtgcggataagggggcgtgcaaactgcgctcgctggattcttttgcccggaacgggctcttgtataatctggatttgaggaacctgccggtggcagctgtcgatttgtcgagatatcctgctttgaaatacgtgaggatgtcgggctgcgatgtggaggagctcgatgtgagcgggttgcaatatttggaaagcctggtctgtgacaattcgcccgtcttgaaaaccgtatttttcaggaatagtgcccaatacgaccggatgtcatggatcaaccttgataagcacatcctgataaggttcaaggagagcgattgatatgaaaaagaggagcgtcactcctcttttttcgttgtctgttcgatgtcgcatgccgagcagttgcccgaacagcccgcggcagaatgcgtatcggagcagccggcgctgccgtccgcttcgcgcgtttcgtgcacggcgcacttgatgcccagccgctgcatgttcttgttggtcgatatttccgagtcgatatggtgccccttgattatcagcgtcagcgacatgcccactacgaagagggctacggcgccgagggcgaagaggaaaacgattaaccacgttggcatgacgatataggtatttttatgtgctgaaattttggctttcggccacaaatgtatacatttgtaagataaattgcaaaaatgctgccttatcctgtcggcgggcggcgctgaaacgaaacgacaacagacgcaatactatgaaaatcgtgatagcgggtgcgggcgagatggggagccatctggcgaaaatgctcagtggcaacggccacgacattaccatcatcgacgccgaccagaagttgctttccgacgtggggagccttgccgacgtgatttcggtcgagggcgattcgacgaccttcgccgtgctccgcaaggcgcaggtgcgcaagtgcgacctgttcatcgccgtgaaccacgtggagaacgacaatgtcgtggcggcgatgctggccaagaagctcggggccaaaaaagccattgcccgcatcgacaacaacgaatacctggaacccaacaacaaggagatgttcatcgacatgggcatcgactacctgttctaccccgagaaggttgcggccagcgaggtcatcaacctcctggggcatacctcgaccacggagttcgtcgatttttcgagcggtaagctctcgctggtggtttttcacctggagccgacctcgcccctcgtgggcaagccgctggaagggttcgatgacgacgaggccccgctgagctaccgcacggtggccatcacgcgcggcgggcagacgatcatcccgcgccgcggcgaattgttcatggagggcgacgcgatctatgtgatcgcccgccaggatgccgtgaaacaggtcatggagttctcgggacagtcgaacatcgagatcaagaacatgatgattctgggcgggtcgcgcatcggcatccgcatcgccacggagttgcaggacgaggtaaacatcaagctcatcgactacaacgccgagaaggcctaccggctggcggagatgctcgaaaggaccctcatcatcaacgaggacggccgtaacaccgaggccatgatggaagaggggctttcgaacatggacgccttcgtggccgtgacggggcgcagcgagaccaacatcctcgcggcgatgctcgccaagcgcatgggcgtcaagaaggtgatcgccgaggtcgagaacctcaattacatcaacctggccgagtcgatcggcatcgacacgatcatcaacaagaaactggtgacggcgtcgaacatcttccgcttcacgatgtcgaccgacgtgcaggccatcaagtgccttacgggcagcgacgccgaggtgctggaattcatcgtcaagcccaatgcgccggccgtgaagagccgcatcaaagacctggggctgcccgaggacacgatcatcggcggcatcgtgcgcggcgacaaggtcttcatcgccgtggacaacatggaaatcaacccctacgaccgcgtggtggtcttcgccatgcctgcgtcggtgggcaaagtgggatacttttttaactgacgacggcgctgtcgggcccggcgtgcgccgggccccgcacaccggcggaaaatgaaaccgaacagacaagtgtcgtttagaagcatattattcaaggcctggttttcgcagcgcgagcgggctatcgaccgtttccggcgccgtcctgctgagacgcaggagcgtatcttcaggcagttgctgcgccgcgggcgcgggacggaattcggatggaggtacgacctggggcatgtccgcagcgtggagcagttccagtcgatggtcgagacgttcgattacgaaactttcaaaccctatatcgaaaagatgctggccggggagcgtaacgtcaccgcgccggggcgggtgaagctctttgcccgctcgtcgggcacgacttccgaccggagcaagtacatccccgtcacggaggagtcgctctggtggaaccacacgctcggcatgcgggacgtggcgacggtattcgcggccaacaacccgaaaacgaaggtcttcgacggcaagacgctgaccctcggcgggtcgtgcagccgcgaggggcgcaaccttgtgggtgacctgtcggcggtgctgatccacgaaacgacgttctggagcggctggttccgggcgccgcgcaccgccacggcgatcatccccgatttcgaccgcaaggtcgaggccatctgccgcgagtgcacgggcgaaaatatcacggccttcgccggggtgccgtcgtggaacctggcgatgatgcgccgcgtgctggattatacggggcgggagaacctgctcgaagtgtggcccaacctctgcatgttcgcccacgggggcgtggagttcgccccctaccgccgttcgttcgaggcgctgatcccttcggagaggatgcagtacatggagacctacaacgcctcggaagggttcttcgcgctggccgacgacccgtcgcggagcgacatgctgctgatgctcgactacggcaatttcttcgagttccgcagcggggataccgtcgtgccgctcgaaggcgtggaatgcggcaaggtttacgccatgctcatcacgtcgaacaacggcctgtggcgctacgagatcggcgatacggtggaattcacttcgacgaatccctaccgcattcgtttcgcggggcgtacgagacagtatatcaatgtcttcggtgaggaattgatcgtcgacaacgccgaccgcgcactgctggccgcctgcaacgaaacgggggccgtggtcggggaatataccgtggcgccgtgctacatgtcgctgcgcgagcggggcgcccacgaatggatcctggagttcgagcgcgagcccgacagccgcgagcatttcgccgaggcgctcgaccgcgaattgcgggccgtgaattcggactacgacgccaaacgccgcacgacgctcgagcggcagcggctgacggtcgtcggccacggccgtttcctcgcgtggatgcgtgcccggggcaagaacaaggtgccgcggctggtcaacgaccgccgtgtggccgacgagatactggcgttcggcggggaagcgaagtgacggcgtgtgttgctgcggcgtaatgccgtgatgcaccgctgcggagcactccggcggccgtccggagcggccgggcagtatttaaaatgtaaaacaaatatcgtataatatgtatatagccattgcaggcaatatcggaagcgggaagaccacgctgacccggattctgaccgagcgttacaacgccaaagcctacctcgaggagtgcaacaacccctacatcggcgatttctacgaggacatgaaccgctggtcgttcaatttgcagatttatttcctcgggagccgcatccagcagacgatggacatgctggccgacaaccgcgattcgggggcgatcttccaggatcgcacgatctacgaggatgcgcatatcttcgcggacaacctccacgaaatggggctgatggcctcgcgcgacatcgaaacctacatgaaactgttccggctgatgaccacgctcatccccaagcccgacctgctgatctacctcaaggcgagcgtgccgacgctcatttcgcagatccgcaagcgcggacgcgaatacgagatgaacatcgacgaattatacctcaagcgtctgaacgacaagtataacaactggatcgacaacatctacgaaggcgatgtgctggtcgtcgacaaagaccatgaggatttcgtctccgaccctacggtgctggagaagatatgtgcgcgcctcgatgcgctcgaaaacagatagcgacgcatgacgctgcctgagaaattcgccgcacgcgtcctttcggagctggggccggaagagggggcggcgctgtgcgccgcactcgataccgagccgcccgtgtccgtgcggctgaaccctgccaaatgtgccggtgcggccgaacccggagcggtgcaggacggcaccggggcggcaccgggaggatacggatcgtcgcaggggagctccgggacggatgtgcccgccccgcttccggttttgcaaaacgccgacggccgtgtaccctggtgcgccgacgggtattacctggcggtgcggccgcagttcaccttcgacagcgatttccatgccggggcatattacgtgcaggaggcgtcgtcgcagttcgtggggcgcctgatgggcggagagggggttgcggggaagcgaatcctcgacctttgcgctgccccgggcggcaagacgacgctctatgcctcgctcgcggggcccggcgggctggtcgtcgccaatgagatcgaccgccgccgtgcgcaggtactggcggacaacgtccgcaagtggggtacgggcaatgtcgccgtgacgacctgcgaaccccggcaactgggcgacttcgaggcgtggttcgacatggtggccgtggatgccccctgctcgggcgaagggatgttccgcaaggatgcacaggcccgcgccgaatggagcgaggggaatgtaaagctctgtgctgcaaggcaggacgggatattacgtgaagcatggcgtgcgctcaaacccggtggcaggctgatatacagcacctgcaccttcaaccgcgacgaggacgaaggcgctttggagcgtatgctcgcatgggcgggcgacgaggtcgcagaggcggaagacatggctgtcgacggggcgtgggggatcgtctgcggccgggtgggggctttccgcacctaccggttctatccccaccgggcacgcggcgagggttttttcgccgccgtggcctgcaaggcttatgatgccggcggccgttgccgcaccccgaaggcgcggcgcacggtatttgcgcaggtggacaaggcgtccgcggcggagctgcgccgttgggttcgcacgccggagcggatgtgcttcgcggcggtgggcgatacctgctacggatattacgtcgcgcaggccgaggccgtgaaggcgctcggcgaagcgttgcccgtgatctatgcgggcgtggcgatggggcagctcttcaagggaagcctgcggcccgatccggcgctggcgttcttctgcggattgaaccgcgaggcggtgcccgctgcggagctggacgaggcgcaggcgctgtgttacctgcgcaggcaaggggtcgccgccggggcgttttccgaaggggtgaacctggtgtgtgcccgcgggcgggcgctcgggtttgcgaagcggatcggtaaccgggtgaataacatgtaccccaatacattgcgaattattaaacgatagatatggccgagaaacttttttattcgatgggcgaagtggccgagatgttcgacgtcaatgcgtcgctgatccgccactgggagtcgcagttcagcgtcatccgccccaagcgcaacaagaaaggcaaccgtctcttctcgccgcaggatgtggagaacctcaaactgatctaccacctggtcaaggagcggggtatgaccctcgagggcgccaagaaggccctgaagcagaagcctgcggccgagggcggcgtgcagcgcgatgccgagctgatggagcgcctgcaacgcatccgtgcgctgctggtcgaggtgcgtgaagacctgaaggcgggccagggcgaactcctcgccgacggggatgccgaagtcccggcggcggaggccggagcggcagtgccccgccgcaaggcgaaacccgtggtgaagatcgtcccggaggatgccgcggcgcagggggctgccgaacccgggcagcccgcgtcgaaacgtccgcgcaagccccgccgcaaaaaggaggagccggaacacaaggagctcttcgccttttacgaacagtcgctcttttaggggcgcaacgggcgccgcatcccttggggaaggctgcgctgcaaggcggaaagcgcagtgccgcggccgcagggcggatggccccgccggggcggaaaaaatgataaccagacaaatcaggatactatgctaatcagggaagtgaccgatgtcatcgagcgtttcgcaccgctcgcatggcaggaatcgtacgacaacgcaggcttgatcgtggggcgcccggacgacgaggtgcacagggcgctgctggccgtggacgtcaccgacgaggtgatggccgaggccgaacgcgaagggtgcgacatggtcatcacgcaccatccgatcgttttccatgcgctcaagcgcttcaattcggcagaccaggtgcagcgctgcgtcgagcgggctatccgcggcggcattgcgctctatgcgtgccacaccaacctggacagcgcccccgaggggatgagttggcggctggccgagatgctgggcgtgggggatttgcgcgtgctccaacccgcgcaggcggacgaaaaggtcgggttcggcgtggtgggcgagctgcctgcggcggtcgccacggtggagttcatgcgccgcatgcagcgcgtgctgggcgttcgggtcgtgcgccacagcgacatcgcttcgcccgaggtgcggcgcgtggcggtctgcaccggtgcgggggcttcgatgatcggcgacgcgcgccgtgcgggggccgacatttacgtcacggcggatatgaagtacaacgacttcatgacgccggataaggccctcaccgtagcggatataggccattttgaaagcgaatattgcgcaattcagattttatttgatattttgtcgaaaaatttgattacctttgcggttcgcaagagtgaaagctctcgcaatccggtgaactatttggtttaagtctaaactatacaagtacattatatggcaacacagaagaaaactgccgacgttgactattcgatgcaggagaagatcatcgcactctatgaattgcagaagatcgacagcaagatcgacgaaatcaacaaggtgaaaggtgaactgcctctcgaggttcaggatctcgaagacgagatgaccggcctgaaaacccggatcgacaacatcaatgccgaaatcgaggagctgaacacgctcaccaagcagcgcaagcgcgaggtcgaccaggccaagatcctcatcggcaattacaaggagcagcagaacaacgtgcgcaacaaccgcgagttcgatgccattaccaaggagatcgagtaccaggaactggagatcgaactggccgagaagcgcctcaaggagtacgccgccggtgtgaaagccaagaaactccagctggaggaggccgaagccgtagcggaaggccgtgccgccgacctggctgccaagaagaacgaactggaagggatcgaagccgaaaccgcaccccaggtcgcagagtacgaagtacaggccgaccgggtcaaggccaagatcgacgagcggctgttgtcggcctatggccgtatccgccgcaacgtgcgcaacggcctggccgtcgtgaccgtgaagcgcgatgcctgcggcggttgcttcaaccggattcccccgcagcgccaggtggagattcgccagggcaagaaactgatcgtttgcgaatattgcggacgtattctcgtggccgatcccgaagaggggatggagtagccctgtggaaaatttaggaaagcgggccggagtgtaaactccggcccgctttgcattggggcaaccatgtcccgggctcttgtccgccgtagcattcgggcgttcatgccccctgtgcccctggattaaccgtccttgccgtatgcgcgtcgcgtcggttttccggggttgttcgccttgtcgtgccgggagccgggagccaggagccgggagtcaggagccaggagccaggagccaagagccaagagccaagagcccgggctgcctaccagacgacctggtcggggaggatttcgccgtcggtggcgtcgcccgcgtcgaaggaggcggctttgtactggatgcagatcatcgtcatcgggctgtcgcccgtgttgcgcagcgagcgcctgcctgcgggcgaaacccgtacgatgcttccttcgcctacggggaagacctgcccgtcgacctggaactccccatggccgccgaggatgatgtaaagttcttcgtgggtcttgtgggtgtggaggaacccgacgctgccgcccggtgcgaactgctggaacgacatctcggccccggtggcctgcaggtcgccgcctacgaacactttccccgggatctccacgcccggtgccagcggcagcgtgtactggttcaactcttcggttttcccgaccgtcacggctgcgaaattcgcgcccgaggccactttttctacctttttcattttttacggattattaaagcgtttattaatcgtgttgcctgtattgccgttgcgaaggtaaggagaatgcagcgttcgtgcaagacggtacgctggcgtatgttgctaacatttaggtaactaatgttgtatctcaggcagaaatccgggtgcaaaaagatttttttttgcaggttgcgcgtgcgcggcgatacgcgcggccgtgatacggggcgttttgccctcccgcgcaaagcctgccgggcaggggctcggcgtgtgctgtccggctgcgggaatagcggccggacaggcggttttgcggggctgggtgggagcggccgggtgggggcttgttgtgcgccgggaggttggggaatggtgtctgccgggcggtttgcggccgggacaggtcagagtgccggggtttcggggtttttaaatttttttgtaaattgggaaatgttaatttattaacaccgaaaatccttcctatttttataaataatccttaactttgcgacgttgtaatttgcctactaaaattactgatagatgaaaatagcccttgcccagttgaactatacgatcggggatatcgacggcaatgcctcgaaaatcatcgattcgatcaacaaagcgaaagcgcagcgtgccgacctggtcatttttgccgaacaggccgtgagcggaaccccggctttcgacctgttgcgtaaaaccaccttcctcgaactgtgcgaggatgcactggtcgaaatagcatcgtgctgcgacggtatcgcggccatcgtgggactcccgatcctgacgcgcgaaggcaccatcagcgccgcggcgctgatccaggatcgcaaagtgctgcgctacgtgggtaagaaatatatcaccgcacgccgcgaaatgggcttcctcgtcccttcgaaggggttcgaatatgcgacgatcaagggccacaagtgcgccatcatcgtgggcgacgacctgagccgcgagcatgacttcgacaagtcggtcgagaccgtcatctcgatcaacgcccgcaagtacggccgggggacgatgacctaccgctacgagatgatgcggcacctgtcgttcgtcgaaggcaagaacctcgtgctggtgaaccaggtcggcggttcgacggacatcgtctacgacggtacgtcgggggcgttcaacaaccgcggggaactggtgctgatgatgaagcacttcgaggaggatttccagatcttcgacaccaaggcggccggcgagccggttacgatcccctcgacctataacgaccgtacgcggatggtctaccaggcggcccggtgcggcctgcgcgacttcttcgtgaagaacggctacaagaaggcctgcatcggcctttctggcggcatagactcggccgtggtggcctgcctggccgccgacgcgctgggacgccaaaatatccgggctttgcttctgccctcgcagttctcttccgaccattcggtcgaagatgccaagaagctggccgagaacctcggcatcgaatataacgtaattcccatcacggaaatatacaccagcgtggtcaataccctcaagccggtcatcggcggcagggagttcgacgccacggaagagaatatccagacccgtatccgcacggtgctgttgatggccgtgcagaacaaggcggactacatcctgctcaactcgtcgaacaagagcgagaatgcgctgggactctgtacgctctacggcgatacggcgggtgctttcagccctacgggcgacctctacaagagcgagatgtacgacctggcgcgctatatcaaccgcacgcagggcgatcccatcccgggcaatatcctcgacaaggaaccctcgtcggagttgcacccggggcagaaggacagcgacatcctgccgccgtacgaagtggtggacgcgatcctttaccgcatgatcgaggaggggcagcaccgcgaggagatcgtcaatgcgggcttcgattccgaggtcgtggagaagatccacgccatgatcatgcgcaacgagaagaagcgctaccagttcccgcccgtactgcgcctgtcgatgtgctcgttcgggcacgagcgccttatgccgcttaccaacaaatacggcgattgagggcggtggcttcacggattgaacatagcggcgtggtggaacgcacggaacgcgacacggtctatgtgaggatcacctcccacagtgcctgcggtagctgcaaggcccgcgaagcgtgcggcctggccgaagcgcaggacaagatcgtggtcgtgaagagtcccgacgcggcgcattatgccgcgggggagaaggttatggtcggcgtccgtcgtagtgcgggcgctgtcgccgttatattggcctatgtcggggcgttggccgtgctgttggccgtgctggtcgccgccgttgcggtgctcggctggagcgaaggccgcggcgcgcttgccgctctgggagccgtggtcgtctattactgcgtattatggctcttcaggcataaaatcgaacacacaattcatttctcaataaccaaacactactgatggaagtattactttacacaatcctgacgctttgtgcgctgggagtgctttccgcggtgatcctttacttcgtggcccaaaaattcagggtcgaggaagatccccggatcgacgaggtggagaagatgctgccgggcgccaactgcggcggctgcggcttcgccgggtgccgcggcatggccgacgcgctcgtgaaacaggacgacatctcggcgctcttctgccccgtgggcggcggcgactgcatgaaggctgttgcggcctacctcggcaagtcggcaccggaaaaggagccgcaggtggccaccgtgcgctgcggcggcacctgcgacaagcgcccccgcaccaacgagtacaacggtgccaggtcgtgcgccgtggcgtcgtcgctctatgtgggcgagacgggttgcgcattcggctgcctcgggttcggggactgcgtcgtctcgtgtgcgttcgatgcgatccgcatgaatcccgcgacggggcttcccgaagtcgaccccgacaaatgtacggcctgcggggcctgcgtgaaggcgtgtcccaaaatgattatcgaactgcgcaagaagtggccgaagaaccgggcggtgtatgtgtcgtgcgtgtcgaaggacaagggcgccgtggtgatgaaggcctgcaaggcgggttgcatcggatgcggcaaatgccagaaggtctgtgcgttcggtgccatcaccattgaaaacaacctcgcctatatcgacccgcagaagtgcaagctctgccgtaagtgcgtgaacgagtgcccgacaggcgccatcgtgctggcgggcatggatccgctgcccaaggcaccgaaggcaccggctgccccgaaagccgcacctgcggccgcgaaggaggctcctgcggcagcccaggctgcccgggccccgaagtccgccgatgctgcgcccgccgatgcgaagggaaccgcaccggtgcctgaagccgccccgaaggccgcacctgcggccgcagagggtgcgccttccgtagccccgaaagctcctgtaagcgaagctgtacccgctgttgagaaggaggttgcaccggcatcccccgctgtgcaggaagcagcggcaaccgggaatgcggcggaggctccgaaaactggcggggcagccccggaagccgaataaacggatgtttccgtaatgccgggcgggtgacgccgtgccgggcatgggagatgaaggaagaaacccaaccgaaaaatcagagaaacacaagatatgaagacatttccaataggcggagtccatccgtcggaaaataaactgagcggcgccaaaccgatcgaggtgcttccgctgcccgacgtggtgacgatcccgctcgcacagcacatcggcgcccccgccgtggccaaggtcgccaagggcgacaaggtcgtgacggggcagctcatcgccgaggcgggcagttttatgtcggccaatatccacgccccggtttcggggacggtaacggccgtggacatggtgcccaacgggcaggggctgcgccaggtgatgattacgatcaaacgcgagggcgacgactgggccgaggggatcgaccgctcggagacgatcgtcagggagtgcacgctctccgcacaggagatcgtcgcccggatcaaggacgccggcatcgtcggcatgggcggcgcgacgttccccacgcacgtgaaactctcgatccctcccgggaaaaaggccgaggcgctgattatcaacggtgtagagtgcgagccttaccttacgtccgaccaccgtacgatgctcgagcacggcgaggagctgctcgtgggcgtgacgatactgatgaaggccatcgccgtggagaaagcctatatcgggatcgagaacaacaaacccgacgccattgcgcacctgcgccgtctggcccaagggtataagggcatcgaggtggtgcccctcaaggtgaaatacccgcagggcggtgagaaacagctgatcgcggccattacggggcgcgaggtgccgcccccgcccgcactcccgatcgacgtgggtgccgtggtgtgcaatgcctcgacgacctatgcggtctaccaggccgtgcagaagcacaagccgttgatcgagcgcgtggtgacgatcacgggcaaaggcgtccgggagcccaagaacctgctgacccgcatgggtacgcccgtcgaggcgctgatcgaggcggccggagggcttcccgccgatgcgggcaaggtcatcaacggcggcccgatgatggggcgcgcgatggtcaacctcgcctcgcccgtgacgaaggggtgctcgggcatcaccgtcatgagcggccgcgacgcccagcgccgcgaggcctcgcagtgcatcaagtgcgccaagtgcgtggctgcctgcccgatggggctcgaaccctattatctctcgaagatgacccagaagaaaggctgggaggaagtcgaggcgcagatgatcacttcgtgcatcgagtgcggctgctgccaggcctcgtgccccgcttacctgccgctgctggactgggtgcgcctggggaaacagactgtcatgggcattatccgcgcacgtgccgcggcaccgaaaaagtaaatggaaaaacagaaagatattatggcaaacaaacttgttgttgctcccgcaccgcacgtgcagacttcgcagtcgacggccaggatcatgcgcgacgtcgtgatcgcgctgatgcccgcgctggtcgtctcggcggtggtgttcggggtggacgtgctgcgtgtcacggcgctcagcgtggcgtgctgcgtgttgttcgagtacctcatccagcggttcctcgtcggcggctcgctgacaatcgggaactggtcggccgtggtgacgggcgtgctgctggctttcaacctgcccgcctcgattccctggtggatcgtcgtgatcggcgcattcgtcgccatcgccatcgccaagatgaccttcggcgggctgggcaaaaatccgttcaaccccgcgctggtggggcgtgtgttcctgctgatcgcctacccggtgcagatgacttcgttcccgatgccggcgaacggagctttcgacgcactttcgggcgctacgccgctggcggccgtgaaacacggcgccgcccccgacgtgctcggtgtgcaggaactgctgctgggcaatatgcccggctcgctgggcgaggtggcggcattggccctgatctgcggcttcgtatacctgctctggcgccgcgtcatcacgtggcagattcccgtgtcggtgctcggtacgatggccgtattcgcgtttgtcgtggccctcgcttcgggcagtaccggggcggtgctgtggcagctcccgctgttccatgtactggccggcggagccctgctgggcgcgatattcatggcgacggattattcgacctcgccgatgaccgtcagagggggggtgatcttcggcatcggtatcggcgccatcacgatgtgcatccgcctgtggggcgcctatcccgagggtatgtcgttcgcgatactgatcatgaacgcctgtgtgcccctgatcaacaaatatgtcaaacccaagcgcttcggcgttaaataggaggtgacgcagtatgaaaagtacacttgtgaatatgacggccgtactgttcggcatcacgctcgtggcttcggccggtgtgggcgccgtgaacatgattacggccgaaccgatcgcccaggccgagcaggcggcgaaggtcgaggcgctgaaggtcgtgcttccgccgttcgaccagaccgcacccgaagcgctgacgatcgacgatatgccgatcacggtctacaccgcaaccaagggaggacaggtcgcgggttacgccgtggagtcgatgaccaagaatggtttcggcggcgcgatcagcatgatggtgggcttcacgcccgacggtgaagtggtcaacgtcaacgtgctcaggcaggctgagaccccggggctcgggacgaagatggccgacaaggaaaatgtgctgctggggagcatccagggcaagaaactcgaaacgatgaagctcgtggacggcaagctggccgtgaagaaggacggcggcgacgtcgacgcgctgacggccgcgaccatatcctcgcgcgcctatgtcgatgcgatcaaccgcgcctggatggcttacaagagcgtagcgacgggtacggcgccgacagacgtatcgtcgggagcgacttctgcggccggagattcggcagaggaacaaaccaacgggccggcggctcaggaaggagggcaaaatgaataaactgaacatcattctgagcggcatcgtcaggaacaacccgacgttcgtgctggtgctgggcatgtgtcccacgctgggtacgacgacctcggccggaaacggcatgggcatggggctggcgacgatggccgtgctgatcatgtcgaacctggtgatctcgctcatcaagaacatcattccggacaaggtgcgcatcccggcgttcatcgtcgtgatcgcctcgttcgtgaccgtggtcgaaatgctgatgaaagcctacacgccgcccctgtacgaggcactgggcgtcttcatcccgctgatcgtggtgaactgcattattctggggcgtgccgaggctttcgcctcgaagaatacgccgctggattcggtgctcgacggtgtcgggatcggtttgggctttacgctttccctgacggccgtaggtgccgtgcgcgagatactgggcagcggcgcgatcttcggcatcagcctcggaacggccgattacatgccgctgatcttcgtcctcgcaccgggggcattcctggtgctggggtacctcatggtattgtttaataaattagccaagaaatagttatggagctttcatatttcgcaatcatcatcggcgccatcttcgtcaacaacgtcgtactggcgcagttcctcggcatctgcccgttcctgggcgtgtcgtcgaaggtcgagacctcgatgggtatgggcgctgccgtaacgttcgtcatggcaatcgccgccgtggtggcctggctgatccaggcttatgtgctcgtgccgctggacatcgtctacatgcagacgatcgtcttcatcctcgtgatcgccgcgctggtacagatggtcgagatcatgctcaagaaactctcgccttcgttatatcaggcactgggtatcttcctgcccctgatcacgaccaactgcgccgtgctgggcgtggcgatcctgatgatccaaaaggagttcaacctcttgcagagcgtcacttattcggtggctacggcgctgggattcgccctggcgctggtgctcttcgccggcatccgcgagaggctcgaattcgaggacgtgcctaaggcattcaagggggtgcctatcgcgctgatcacggccggtatcctcgccatggccttcatgggcttctctggactggtataacgacgtcccgcaatgcgaaacagccaccttcggaaaagaaggtggctgtttttgtgaagggggggggagcccttaccgttttttcccggatccgggacttgccggtcacgcctcgccggtcgagaccgaagtcgtagcgactgccgttttcagacttgcggatgaataccgggacgtaatcggattcacgggggctgtccgtcgatgggcaatggtgttcgaggagcctacggttgcagggtaaatccgttttcggcccggaaggtttgcggggacaacgaattttaccggattctcttccggttgagtaaaagtaaggcggtcaactccgtcggaggttgaaaatttaccggaaagcctctcttccgtgcttttcccggaggtaaatcggatatccggcgttgcggatgaggaaaaaatgtgtaatttagaattccgaaaactaccgtccatgcgtccgaacctgatactttcccgcctttttgcaactgtgcttgccatgctggccacggtggggtacgtgtctgccgaaccctattccaaaatccggttcgtgccgatcccttccgacatcctgccgtcgagcgaagtacgcaaactctatcaggattccgacgggtatatctggattccgacctataacggtctggcccgctatgacggatacggagtggtcacttacggtatgcacgacgtttcgggcgtggcgttcaattcgttcgtgaatgtggtggccgaagaccgcgacaaggcgatctggatcgggactgagcgcggactgtttcggctcgacaagaagacgggcatgatttcgacgacgggctgcgagcaggtcggcgattgcaacatctcggtcatcatctgcgatacgggcaacgggatttgggtcggaagcgacaagggcttgttccggaaaaatgcctcggaacatgatttccgtccggttacgatgcgcaatgccgatgggaagcccgtcacggacatcacttcggtcgtcaaggatgccaattgcagcctgtggatcgcttcctacggcagcggattgctgcgctacgatctgcgcgaagagcgtacctacacgtatgacgacgagatcctgcggcatgcgcatgtcgtcttctgcgatgcgggcgggaatgtctgggtgggcacctggggcgcgggcctgatccgcctgataaacccctatgctcccgggcggatgcaatatgcccgttacatgcaccgtgaagacgacgatacggcgctgctcgacgacattgtctatgccatcgaagaggatattacgcagaacacgctgtgggtgggaacccgcagcggactgagtatcctgcatgacccggatcaccggccctcgttccagaatttcaaacccggcgaggatgtgggcgacctgccatacaacgaggtcaattcgattatgcgggcccgggacaaccttatgtggatcgggatgctgggcggcggtgtttgcaagatacagaccgcaggcatgaaattcgaattcaaccggctcgatccggtgcgtgcccgcttcaacaccagttccgtacggagtatgtattacatcggcgagggcgaatattggctcgggctgctcgatttcgggctgatcaggtataatacccgcagcggccgtatcgtcagctaccgggagcatcccgacctgtgtgtgctgccttatacttcgaccgtcaatgccataatcaggaggaacgccacttcggagctgtgctttgcgacgtggagttcgggtgtatggtgctacgacgagaaacgccatcgcgtgcgccagatcaaccggaatacgctgccgctgtttgccgacgactgcgtgctcgcgctgcgggaggatccggacgggaatttgtggatcggttcgaggtcgggaatttatatcgaatcggcgtccgggcagctctcgacgctcgacatgtggctggggcggaagacgcccttcgcatcgacgcgcatattcgatatctgctgcgtcggcggcggggtcgtatggattgcgaccaacggcgacgggatcatccgtgtcgatacgaaaagacgtgactggatccagtatcgacgcggggcggggatgacggccgataacgtctattgcctcggtacggacgatgcgggtaacctctgggcggggacgattgccgacggactggcggtatattcgccctcggaggatcgtttcaaggcggtcacggcatttcccaacatcgagaaaaaggggatcaccaacattgctagggatgagaacggccgcatgtggattacgaccaacgatgccgtgttctcgttctcgcccgacgaaaacggtactcccgagcatatcaacacctatattattacggcagacctgcaatcgttcttcttcaaccgcaatgcatcggcacgtgtcgaatacggacgcatggcgttcggcggttcgaacggactgcgcatctttacgggcaaccgcatccagccccaccagtcgaaacttccgatcgtattgaccgatttccgggttcacaaccagtccctgcgtaccatgccggaaaaggagcgggagcatatcagctcccgggagatcgactatgcagatgaggtgacgctgacccaccggcaaaacaatttctatatcgaattttcgatgctttcctatgccaatccgagggacaacatcttcaaatacaagctggacgggttcgacaaggagtacgtattggtcgattcacagcaccgcttcgcctcctacaacaacctgcctgcgggcatttataccttccatttgcaggcggcgggcggcaacggtgtctggagcagcaacgagcgggtgctgaaggtgcgtatcctgccggcaccctggcgctcgtggtgggccgtggcgttctatctcgcagcccttgcgggggtggcctacggcgcgatccgcttcctgcgctaccgactgcgtatgcagcatgaaatccgcatttcgaaattcgaacgccggaaaaccgaggagctgaaccacgcgaaattgcagttctttaccaatgtcacccacgagctgatgacgcccctgacgatcatcattacctcgcttgacagcctgcgcagcacctccacagaccgggaggcgctctacaacgtaatctcggtcaacgcgacgcgtctgatgcgcctcatccagcagatactcgaattccgcaaggtcgagagtggtaacctgaagatccgggtttcgcaaggcgatgtggcggcattcgttcgcaaatgtgtcgaggcattcgccccgctggtatcgaaaaagcgccttcgggtctacttccagagttctgccgaccgtatcgaaggctggttcgattccgacaaactcgataagatcgtctacaacctgctttccaacgctgccaaatacacacccgacgaaggggaaataaaaatccgtgtggggatggaaagccccggttttgtcggtataatgatcgccaatagcggtgaatgcatgagccagcagactatcgacgggcttttcaagcgcttctacgacggtaattaccgtaagttccataccatcggtacgggtatcgggttgtcgctggtgaaggatctgaccgatatccacaaggggcatatccgggtttcgagcagcgaacgggagggaaattgtttccgggtcgtattgcccataggccgggacgcctactccggggaagaggtcgacgaatcggtgccagggcccgattcggcggatttgatgccgggatcggcggagttgccgtccatgcggccggacgaggcggttgccggagacgggcggatgtatacgattctgatcgtggatgacaacgaggaactgcgggtgctggtgtccaacttgctggcggcttatttccacatcgaaatggcatccggaggcgaagaggcactgcaacttttggccgaaaaaccggtcgatctggtcgtttccgacatcatgatgcccgggatggacgggatcgagttgtgcgccaagatcaaggggacgttcgaatattgccatatccctgtcatccttctgacggccaaaaacacggacgacagccgtatcgaagggtatgactcgggggctgacggttatgttaccaagccgttcaacttcaagctgctccatgcacagatcgtgaaccagctcagaaagcaggagcgcaaaggttcgcatttccgcaaccagcttgtctttgagatcgaagcgttggaatatacctcgatggacgaagatttcatgcgccgggctatggcgtgcgtcaatgcgcatatcgacgacggcgaattttcgcaggccgatttcacgcgggagatgaacacgtcgcgtaccgtcctcaccgagaaactcaaatcgctgacagggcttactccgaccgcgtttatggtcgacatacggttgcgcgcggcttaccggttgctggaacagcagcgccacatgcggatcgccgatctggcttatgccgtagggttcaacgacccgaagtatttcagcacctgtttccggaaaaagttcggcgtcagtcccaaggaattcatcgaacaactcgatggcaagggtgaaaaaatcgtataacccggatattttccggaggtgtttgtgtaatgtgttgttatgcattgtattgcctgcgttgtgtcggtcggctgttgcagccggccgatttgcgtcagagccgttttacggtaaaatttcaacctcgaagccgtcggggcagagtattttcgtatccggcaaaagccctttggacggggctgtcggaaccgaaaactaacctaaaaaacaatgccatgacatgatgcagccatcccggatgaaccgtagtgtccgatccctttcccttttttccgaataaaccaactaaaccctaatctatgaaagcagatttctacaagaattacatgagtgccgtattcgtcgcagcggcgctgtccttctgctcctgttccgacgatcggacggtctcgtccggcggtctgccctataagtcaatccgcgtgaccgtcgacggcgagacggtcacagcggagcggatagatgataaaaacctggccctgagattcgatatggccgaggatttctcacatgcccggatcgacgtcgagctcaacgagggctattcggtcattttcccgacggacgttaccgccgccgacctggatacctatccggtgctgaacttccgggcacccgataaccggatcgtcaaggtgtggttcacgatttcgtcgaaggcatttccgatcaccgatgctacgaaggtgactgcttcgggaatcgggggctgcgtttccgtatcgggcaagacgcttacgatcacttatgagcggagtatgaaccggggtgaaatcgaactcgattttgccgaaggtgccctgatggagggagcttcgatcgcctcgtctacgacgttcgatttcacggagtcgcttacccggcaactgaaagtcgagatggatggcaaagagcgcatctacaacgtcaggatagactattcgaaagtgatggacaaaccgatcgtctacgggtttagcgaggtcacgggcaattatgtcgaccagcagctctatccgttcctcaatgtctataaggcaactacggtcaacagcgtacccgtacgcggtgcggcaacatccgaaaccccatggagctgggatcccggtgccggtgacctggacgtttaccttgcctttatcggcaactgggccgcaaatcgcccgaccgaaacgatcgagggaatcgaattcgccttcgccacgatcgacattgacaaggcgaaagcctatatggtcagcaacgatgcccgctcggtggtcatggacgacgtggcctcgctggtcgcactcaccgggatgatgaccaaggagagcacgatgatttactacaatgggaaagtgctctccgaccgcaattccgagggcgactggcgcgggacggtcggtttctacgaggacgggcacgttgaattttggaatgcgggtatccgcgacggcgaactggtcaggatgacccaatgggtcgatgaggcgggacgcgacgggtatcttgcctcggggactccgtgggatgtggtctccgcggcgtcgggacacccgtggttggtacgcgaggggcatctgctgacccgcctggagatgtattggaacgataccggatgggaaacggccctgggcgaagcctggaacggcacgcgcagccgttcgtacatcgggctgacctatgacaacaaactcggtgtcgccgccgtgtccgaggggacgggaacctgccaggctgcgtggctgctctacaagatgggctggaaagacgtgttctacgtggccggaagcaactacttggatgacggtttcacgccgacgctcaaggtgggcggaaacgtcgtcgtgggaaaggccgaccaggccgcgcaatatgcaatcgccatagatgtcaaacagtaacaactcgcaaatcatgaagcaaaccatatatctgatcgccgtctgcctgatgttcccggcgtttgcacttgccgccggcgcgggagagccggatgcggcgggcttgcaggccatccagggcggcagccggtcggtaacgtataagggccgtgtggtcgacgaaagaagttccgtaccgctcgccggtgtcgccattgttgtcaaggacgccccgcaaatcggtatgacgaccaactccgagggtgaattccggatcacgattcccgtccgctatcaaccgctcgtgtcggtttcctatattggctaccagcccagggagtcggtgctcgtggctgcggcggacaatgaaatccgcctgaaggaagaggcgcaggcgctggaggaggtgcaggtcatcgcctacgggcaacagaaaaaggtgtcggtgacgggcgccatcgcctcgatcaataccaaagacctgctcaagtcaccgagcggcagtgccggcagtgcccttgcgggggccgtgacaggcatttcgtcggtacagatttccggacagcccggtgccgaagaccccgacatttatgtccgcggtacgggatcgctttcgaacgaggcgtcgaagccgcttatcctggtggacggtgtcgagcgttcgtttttccagatggactcgcacgagatcgagagtgtgaccgtcctcaaggatgcatcgtcgacggccgtattcggggttcgcggcgccaatggtgtcattctggtcacgacgcggcgcggtacgaagggcaagccacagatttcatggaactcgaccttcggactgactcagtcgctgcgacacctgaccggtgtcgacagttatacttacgctacgctctattccgaggcccagcgctccgacaatcccggcattaaggatgaccagctcaccttttcgccgttcgtaacggaaatgttccgcacgaaggccgatccgatcatgttcccggatgtggactggagcaaatacatcttcaagaacgtcgcctggcagacacaacataatgcgaccctgtcgggcggcggcgaccgcatccgctatttcgtgtcgttgggttacctggatcaggacggcatgatgaagcgtttcgacgagagttatgacccgaattacaattatcagcgctttaactaccgctcgaacatcgacgtagacattacgaatacgactcagttgaaagtcaatatcggcgggcgcgtgagcgacaaacgcgaaccgctgacctattcgctctggcagaatatcatgtggtgtacgccgttcgcaagtccgggtttcgtcgacgggaagtacatctacaattacaagaacaactacatcccgcttacggaactcacgagcgggctggactgctactacaactggggttaccgcaaaacgacccagaatgaactgaacctcgaccttgcgctttcccagaacctcgatgtgattaccaagggattgaccctcaatgtgaaaggagcatacaatacctcttactacctggcgaccaaacgcgccccgaccggtacgaacagttcctatacgccgatttatctggggacgatcacccaacccggaatggatgtctcagacccgaggttcgacaatacgatcgtctaccagaccgacggcgtgacgggtatgcgcgagccgatgacctatggtgaggacgggtcgggcaaatcacgcaactggtatatagaggcgagcctcggctaccagcgtacgttcggtgaccacgcggtgtcggcactgctgctttacaaccagtcgaagacctactacccgggtcagtataccgacatcccaaccgcctatgtgggttatgtggggcgtttgacctatgcttacaagaaccgctatctggtcgatttcaacgccggttacaacggctccgagaatttcgccccgaagaagcgctacgggttcttcccggcaggttctgtgggctggatcgtctccgaggagaatttcatgaagaaccagcaaaccgtcgacttcctgaagttgagggcctcgttcggactggtcgggaacgacaagtacagcggtgcccgtttcctctacctcgacggctcgtggacgggcaaccatgccgtatggcagaacggctacggcagctaccagttcggtatgggcggaagtatgacgatgctgcccgatgcggtcgaaaatacggtcggcaactccgaggtgacgtgggaaaaagtacgcaagcagaactatggcatcgacctcaaaatgttcggtgcgcgcctcagcctgacggccgactactttttcgaacaccgctacgacattctttcgacccgcaatacgctgccgtcgatcgtcgccatcgagctgccgctgatcaatctgggcgaggtcgataaccggggctatgaaatctcactgggctggaattcgcgtgccgagaagatcgactggtgggtacagggcaacgtctcctactcgaagaacaagattatttttatggacgaagtcatgcccaactatccctggatggctcagaccggacgcagcacgggactgaactacgggtacaggttcgatcgtttcctgcgagccgacgacttcgatgccgacggagccctgaaaaccgacggggaggggaagccgctgctacccgtcatgtcgctgggatcaccccgcccaggcgacgcgctctttaaagacctcaacggagatggcaagatcgacggcaacgacaagacctacttcggttacagtcagcgtccggactatgtgctcggcctgctgggcggattccggtacaagaatttcgaaatttcgatgcagtggacggccggcctgcatgcctcgcgtatgctcagcggcgaataccgtaatgctttcggcagtacaaacggccgtgcgctgctcaaattcctggccgacgggcgttggacgcccgagaaccccgatgcgcgttttccacggctgaccttcctcaacaagtcgcactacctggaggattccgacctgtggctgatggacggctcgtacctgcggctgaaggttgccgaaataggttatacgttcagggatattccggcattccggaaggtcggcgtcaagtcgctgaaggtttatttcagcgggtacaacctgttgacgcttttctcggagctcaacgacatcgatatcgaccccgagggagcgacgagcggttcgaatatcgattcctacccgaacgtgcgcattttcaacttcggtgtaaacatcacattctaatcgacactccactatgaaaaagacgataatatccattctgatcctgggcggtttcgtgtcgggactgaccaattgcagcgacctgaaattcggggacgggttcctggagaaagcgcccggcggcgatgtgaccgtcgacacgatcttctcgtcgaagctctatgccgaccgggccctcaattcggcctatgccacgttgcgctgcgggctcacgatgcacaatcccagcgtgaacggcgggtcgtacgaacaccagaatgccggtaacaaactggcatgggacaacctcgatgccctgaccgatatcatcaacacgcattgttcgtggggcggcgtttacagcatgtattacgggggcgcatacgacgccgagaccgagaatgagtcgagcggtacgaagatggggttcaaccccgagcaggacgtgacgtggacgggtatccgcaaggcgttcctctacatcgagcatgttgaccgtgtgcccgacatgagcgaggcggaaaagattcggcgcaagggcgaggcccgaatggtcattgcgtgccagtaccacgaattgctgcgccacttcggtggggttcccttgctcaagacagccgtcgaggcgggtaaggaggccgatatagactattcgcgccggactttcgaagagacggtcgaatacatcgtcgcgctgtgcgaacaggctgcccgggagctcccatggacggtcgacccggccgatgacgggcgttttacgaaggcttcggcgctggcgctcaagattcgtgtgctgctctatgcggccagccccttgttcaatgcgaatcagccttatgccgagccgcaacaaccggtactgggcaatatcggcaagatcgccgaggagagtgtccggaaagtggcgtggtatggcaattacgatgcccagcgctggaaccgcgtggttacggcttgcgaagagttcatcacggagaatgccaacaacggcaatccctataaactcgtcgaagcgaccgaaaagacagccgaaggttacggaaaggcattcggtgcgtgctatgcagaccgttacaacggcgaaatactgattgccaccgggcggtcgaagcgtacctacggcgatacttaccatgcctattacttcggcatttcgaccgatttcaacggagcgaacgcccaggggtacggcggtggctgcgtgacgcttaactatgtcgataaattccctttctcgaacggggaaccggcgccttatgccgaatggatccggacgcacaattcgaccggaacggtgacggacaatcctttctcgaaccgggatccgcgcctctaccagtcggtgatggtgcccggcggcccgttccgcgaccgtgtggcccagatgtgggaaggcggtggcagcgaggatttggtgaactatgccaaggatcgggccgcaacgggtttctgcaaccgtaaatacctctgggactataaccgtgcgacgttctacgacaaaccgatgaactactcctatatgcgcctggccgaggtttacctggcctatgccgaggcattgaatgagacgggacgcaaggacgaggcctgcaagtggctcgacaaaacccgcaaccgcgtggggctgccctccatgaccgacgaattgctgcaccgcctgcaccgcggcaaggtgctgccgtcctatcccgaatgtgcgcttgccggggatgccgagctgcgcgaggagatactcgacgagcgggcccgggaattcgccttcgaggagatccgttggttcgacatcgtgcgctggaaacgtgccgatattttccggcagacgctttacgggatcagggtgacgatcctggacggaacggattcctcgaatttccggttcaatttctctgagccgattcccgaaaccgaccgcgcctggaagaacagctttgatccgaagtggtatctgagcgcctttccttcgaacgaagtcaacaaggggtacggcctgactcagaatgccggatggtagacatacatggttaaacaaacagagagcatacaatgaaaaagatatcaatcatactgctgttcctggctgccgtttgtccgctggcacaggcgcagcgcgtcaaggtgtatgtgaccgatgcatgggacaagccgctcggcgaggttgccgtgacgctcggccgcgggcgaacccccgtggcggttacgggcgccgacggcatggccgaggtcgatgccggggagggtgaccgcatgacgctgacccttctgaaccgcatgagccgcacggtagccgtcagcggtggcgagatgcatatccgcctgacggacgatgacgtgctgttcgatgtgggctatgacgagcgcgtccgcaaaggctccgcgtcggcatcgctcgccggcgctgcggcacgtgaaatcgaagcgggcggccgtaccgacctgatgagcaacctttacggcctgattccgggactcggcgtgcgccagggcgagaacctgccatgggactcggcgcccgacctgaatgtgcgcggcgttggttcgttcggcgggaacagtgtggtcgtactggtcgacggcatcgaacgcgatgcggcctgcctggatcgggaggaagtggagcgcatcaccgtgctgaaggacgccgcatcgctggcactctacggtaaccggggcgccgacggtatcgtcgccgtcacgacccggcgcggcggcgaccacggcctgcgtacccgcatcgactacaatttcagcgtgcagaccccgttccgggttcccgatatggccgatgccgcaacctatgcgacggctgtcaacgaggcgttggaaaacgacgggcttgcaccccgctatacgcagcgcgacatccgttcgatggtgcggggggagcgcaccgatgtactgcccaatgtcgactggcggaaggctgtactccgcaatgcgggtttcaaccacgacctgaacctctcgttcgacgggagcggcggccgtatgcgctatttcgtgctggccaactataactccaaccgcgggatgctggataataccgacctgaacgatggctattcgacccagatcgagatgtactccctcaagctgcgttcgaacctcgaggccgcgatcacgaaaaccacgaccgcacggatgaacctgatggggcggctgatgcaataccaactgcccaatgcgggcgtcgcgctcgatgatatgtacgacacgccgtcggcggcgttcccgatccgggttcccggcgggggctgggcccgcagccagctgttcgccaatcccctggccgacaaggccgcgggcgggtacaacacgctgctgcaacgtacgctgttcgccgacctgacgatcgatcaggacttgtcggcacttaccccgggactttcggtacaggtgcgtgtcgcctatgacaattccgcggagattaccgatgcgcactcacgcaaatacgcctattcgaatacctcgacggtcttcgatgcggacggcaatgccgcttccctggcattcgttccgcaggggaacgataccgaactggcattcgacagcttcctttcctattcggtcatgcgggcgtcggtgtgggccaaggtgctctacgaccgttctttcggaaaacatacggtgacggggcgtctgattttcagcgagaacaaatcccgttaccgcggagccaacaatacgtacatgtaccgtgactatatcgccagcgccggctacaattacgacgaccgctacgtggtcaatgccgtcgctacttacggcgggagcagccgtatgccctacggggacaagtaccgcttctatcctgccgtgtcgggcgcatggatcatctcgaacgaggcgttcctgcgtgacagccgtgtcgtcgacctgctgaaactgcgcgcgtcgttcggcattgtgggtatggacgcgcgattgtcgtatgacatggacaagcagttcaacggcccgggcaacagttatatttttgccgggatcacttcgtcgaacagcctcgcgcaaggggcgttgccgtctgcggggatcgaacccgaacgcgactataaaaccaatgtcgggttggaactcagcctgctgggaagcttgagcgttgaggtggatttcttccgcaacatgcgtcataacatccggacgtcggccgcgggtaccgtttccagcgtgctgggagtcggcgtgcccgacgtctttaccggtaaggtgcgcaactatggcggggaattggcggtgggatggcgccgccgcacaggcgacttcggatatgccgtgcgggggaatatcgcctatgcccgcaataagatactcaacaaggaagaggaatacaaaccttttgactatatgcgtattacagggcagccggtagggacgttctacggattggtggccgatgggatgtaccaggacggcgatttcaatgccgacggttcgctccgggaggggcttccggtctcctcgtaccagaatacggtacgcccgggcgacgtgaaataccgcgacctgaactgggacggcaggatcgacgactacgatcgcacctaccagctctatgccgcggtacccgagatttattacggcttcagcgtcgagctgaaatacaggggcttcggtgtcagcgcctatttccagggtgtcgcccattcgacgctggagacgacgctgtcgagcatctaccagccgctgtacggcaacgaccgcaacgtttcggagtactatatggagcaccgctggtcacgcttcaataccgaaggccgctatccgcgcctgaccacattggcaaacgggaataactacacgcaaagttcactatggacggaaaacggcaatttcctgaagttgcgtacattgcaggcttactacaaattgccgtcgaagattgcccgcaagctgcgtatgcgcgaatgcagcttctatttccgcggtctgaaccttttctcggtcgaccatgtcggtattctcgatccggaatacgtcagcacggggtatccctcgtcacgcagctaccagatcggcctgaacgtcatattctaaatacgccacaacgatgaaaaaatacctgatcttattcgccggatgcacgcttctgatggctgcgtgcagcgatttcctggaactcgacgagtcggtgtaccagacgacgaaatatcaattctcgaccttcgaccgcgtgaagcagagtgcgacgaacgtctactcgtatgtgcaggaagggttgctggatgtcgaaggtacgatgatcgacgctgcgaccgacgatgcggtatacgcctggtctacgggcggtatcaaacgtttttacgacgggagctggaacggaacgaacctgatcgacgaccgctgggcttcgctctattcggctattgccgcggccaactatttcctcgacaactgcccggatgatttccccgaggcacagtatcaggacaattacaagacgaatctggcggagctcaagaactatccgttcgaagtgagggccctgcgtgcctatttccatttcgaattgctccggcgctataaccggatcgtgatcggtgaccgttcgttcacgatgcaggaggtcaatacgctcgttccggtctcatacgacgatgccgccggatggatcgtctcggaatgcgatgccgtaatcccgtcgttgcccaagacctatctggggacggaaaagggtgaagtcgcccgtgtgacaaagggcatggcgatggcgctcaaggcgcgtatgctgctatatgccgccagtccgctcaacaaccccggcggtgatgcaggccgttacctggaagccgcggccgcggccaaggagctcatagatgccggtatttacaagcttgtcagcgaggaaaccacgaacaatgccgatgcgcaggggctgatcttcggcaagtggtgcccggtgagcagcgatttcgaggcggccaatttcccggtaggcttcgaaggcgggaattcgggcgtctgcccgtcgcagaacctcgccgaggcattcgatatggcgacgggcgaaccgttcgactggaacgacgagtcgatgcggtcgcggatgttcgttgcgtcggcacgcgatccgcgctttgccaggacgctgatatacaacggggcgacgttcaagggacagcccgtccagtcgtatgtcggcggccgtaatggccggccgctcgacggtgctacaccgacttcgtactacctgcgcaaacacattgtcgaggcgacgagtttcgtgacgggcagcgagatgagttatcagcacatctttcccttcttccgttatgccgaggtgttgctgaactatgccgagacattggctgccgctacgcagaaccccgattttacgggcatgaagggggaggtggagtatacgctctcaccacgcgaggcgctcaacgcagtccgtgcccggtacaatatgccggggattacggaaacggattatgcggccttcgtgaagcgtctgcgcaacgagcgtcgtgtggaactggccttcgaggggcatcgtttctgggacatccgccgctggaagatcggtgccgaaacgacgaaggtttatgggcttacgattactccgcagaacgatggctcgttcagctatatgcggtcggtgatccagcagcgcggctgggaggacaggatgaatttctatccgattgcggatgccgagcttttcaaaaatcacaacctcgtccaaaacgacggttggaaatagtcaaaccgataaaaatacgatacgatgaaaaacaagatttgggcgacattcgcgtttgcggcgatcttctgttcggcatcctgcgccgaggacgatacgtttgccttcaatcccgattacaacactcaggacgggtatactcctgacgggatcgcctcctggccgcaggctatcttctgcttcgacgacaaccgctgtacggaggtggaaatggctcccagccaggctgccctgcgggggatcgaaacatccggcaaccgggcgacggcgctcgcattcgcctcgcaggacaacctctcgtttacgaacacctccaccggggcgcactcgaccgagtatatcctgcgtgtggaggatatcgacgccgaaatccctgcgatctggatgcaatgcgcgacgcggcagcagataagcaagggttttacgctcaaaccgcttacctcgtccgtgaaggtggtactggtaaatgcccccgatacgctgcgatccgtcgtactctcccttccgcgtatgaccgatgcgctttacatcgcttcgggaaagaccgaacctttcggtgaggcgctggaaaaacaggtcgaggtaggccgcgcgggggcggagttcaacatcttcccgatggcccggcagacagcggcctggaaattggggttcaaggtcaggttccccaattcggaagcagatggttacatgatgctgcgggagggtgtcgctgcagggcagacgatcgacctggagatagacttctcgaaactggaagaggagttcacgtacgatgtggcttaccgcgttgcggcctacggtgaacagggcggtgaattgacgaagggcgaattcttcccggtgctgccgggcgacgacaagttcagggacgcgaatccctattacaacgtatacgtgctcaaggatcgccgctggcagaccgtcgaggtgcgcaatgccctttgttccgattccccgaaccatcacgaggaaatatggaacgactgggacaactccaagaaactgcgcgatacgatgtgttatgcgctctttacccacgattttgcggatgccgtgcgtgtgaaggtcgaaaaacgcagcggattttcgcgtgtggccgtacgtccgtcggcgtacgggattacgaccaaggagagcgccagcagcaatacggtcgaattcacgcttccggcgtatgagaaacgcaaggtgtcggtcgagttcgacggcgaccgctaccacaacctgttcctcatgccgagccgtcccgatacacggaagcctgcggtgtcgggcggcaatgtgagctactatggccccggtgagcatacggaaggcattatcgtcctgaccgaggggcaaacgctctatgtcgacgaaggggcggtgctctatccgcagaacatacaggtcaggggcaacggcgtgacgattgcaggccggggcgtcatctccggcgagaagatgcgccattggggcgaggagttttccaacgccgatgtgatgatcgacgtgcaggggaacaaacacgagggcggctatacggacttccggatcgaaggcgttacgatgatcgatgccccgagctggtgcctgcgcgtcatgaataccgataacgtggccattgaaaacatcaatatgatccactgggatctcaacggcgacggtatcgacctgtgtacggtcaccggggccacgatcaacgattgcatgttgcgtgcttacgacgattgcatcacgctcaaggtgcgttccaatgccgatccctatggcaatgtccacgacatcaggatcaccaactgcatcatctggggcgactatgcccgcggcatcgtcgtgggccccgagtgcggcaacgtatggtgggcatcgggcgatatccgcaatatcgagatccgcaactgtaccgtgctggaggctgcccgcggacaggcgctcgccattatgcaggaactgggcgatttttcggaagccggagggccggcgctgatcgacaacgtgctcttcgaagactgcgtagtggataatatccattcttcgggcaccccgatctataccagccaagtcaacaagggcgagtcctgcgagatgaagaatgtggtcttccgcaacgtgacgatcctcgacgggctcgggtgccagccttcccggataaacgtcaacaacacctatacaagcatagatttcgacaacctgatctataattcgcgcaagattacctccttcggtaaggagatcgtcctggaggatacttcgagcgaaccctgggaacacacctggatatcgttcaaataattaattgatccattttattcattccaacccttttaggcggagcccggacaaccgggctccccggcagggagtataatttctatttcgtacgtatatgagattcatttcagagatttccgttgtcgcgagcctgctttttgcggtggcatgccacgatccgcagccgggtgcagaccttgttcccctgcccgcggagatgacctttaccggcggctatttccagaccgacagcgtgtctttcgtccggggtgtcgccgacggcagggtcgtttgtgaactcgatacctcttcgccgaacctttcacgcgaggggtatgggctcgaagtccgcagcgacggcattcggattaccgcggtcgactctgccgggttgttctatgcccggcagacgctgctgcagctgctcacggcaaaaggtatcccgtgtgtgaagattaccgataatccgcgtttcggttaccggggtatccacctcgacgtttcgcgccatttctttgccaaagaagaggttttcaagatactcgatgaaatggcacgttacaagctcaatgtcttccacctgcacctgaccgacaacggcggctggcgcattcagatcgacaggtaccctttgctgacccggttcggggctttccgggcggaggccgactggctcaagtggtgggaattcggcgacaggcgctacgttccggaggggacgcccggggcctatggcggttattatacgaaggatgacattcgccagatcgtggcttatgctgcggcccgttatatcgaggtgattcccgagatcgaattcccggcgcactccgacgaggttttcatcggctatccggaattgtgttgcagtggaaaaccctatacgagcggcgaattctgcgtgggcaatcccgcaaccttcgaattcatggacggtgtgctgaccgaggtcatggagctgttcccttcccggcggatacacatcggcggcgacgaggcccgcaaggtcgcctggaaaacctgccccaaatgccagttgctcgccaaggagctgggaggcctggacgaagtgcagtgttacctgatcgagcatgccgaaaaattccttgccgaacacggccgggtgatggtcgggtgggacgagatactgcggaacaatctgcggcctacgtccgttgcgatttcgtaccgcggacagaggggggctatcgaagccgccaaccgcgggtacgacgcggtcatgtctccgggcgaaatcatctatttcgactggtaccaggctaatccgcacacgcagccgcgggcgatgagcggattctcgcccatcaagaaaatgtatagcttcgaacctgtcccggatacgcccgaaagggctgcggccaacgagtcgcttgtcaaaggcgaatatgtggccccggattcggtcgagcacatccgcccgaatgctgcatcgcatattatcggggtgcaggggtgcacatgggccgagttcataggtactcccgagcatttggaatacatgatgtttccgcgcctgctcgccattgccgaattgggatggacaccccgggagcgccgtctgtgggcggacttccgccgtcgtgtcaacagccagatcccccgcttgcttgcccgtggggtcaatgccttcacgcttagcaacgatgtcgagatcacggcacgcatcgtcagggagggccgcaaggcccgggttacgctggatacggaaaaatatccggccgaagtgcgttatacgctcgacggcagcgacccgacggccgggtcggacatctactccagcccgttcgtcgtggaggccgggacgaccgtgaaggcggccctgtttgtcggagggaaacctgccggcagcattgccgggctctatgtcgatgcgtgccataatgtggagaattattatgcctacctggaaactcccgaggtatatgcttcgacgaaccgctgattggatcggcttccgatgtgcgggaaccgcactggggcgggagcgaaacggcataaaagtgaaatatgttaaaaaatgaatgtcggtagaatgaagaaaattccgattttgtttctgggcttgctgggcggattggccgcatgtacccggatacccccggccatagcgcccgataaaaagatagaaacccgcatcggggagctgctccaaaagatgaccctcgaagagaagatcgggcagatgtgccagttgacggccggggtggtgatcgaccagagcgacccgcagcacccggtgttgagcgaggcgctgctcgatacggtgatcggccgctataaggttgggtcgatcctgaatattcccttcggtgtgggacaaccccgcgaggtgtggatcaggtttatcaatcgcatccagcaacgctcgctcgacgaactggggattccctgtatctacggggttgaccagatacatggcgcatcctatacgcagggggcgaccctctttccgcagggcatcaatatgggggcgtcgttcaaccgcggactcatgcgcaggtgctccgaaatttcggcttatgagacccgggcatgtgcgatcccgtggacttttgccccggtcatggatttggggcgcgatccgcgctggccgcgcatgtgggagagttacggcgaggacacttacgtcaattcgcagatggccgtggcgtcggtgctcggatttcagggggaggatcctaaccgtgtcgacgaccgccatgtcgcggcctgcatcaagcatttcatggcctatggcgtacccgtgtcgggcaaggatcgcacaccctcttcggtgactcgcaatgtgttgagggagaagtattttgctccttttatggagtgcattcgggccggggcgctgtcgctgatggtcaactcggccagcaacggcggtatgccgttccatgccgaccgggagttactcacgggatggatcaaggaggagctcgactgggatggtctgatcgtgacggactggaatgatatttacaacctttgcgagcgcgaccatattgctgcgagccgtaaagatgccgtgcgcattgcggtcaatgccggtatcgatatgtcaatggtaccgtcgagttgggatttctgtatttatctcagggaacttgtcgaggaggggcaggtctccatggagcgcatcgacgatgcggtgagccgtgtgctgcgcctgaaattccgccttggccttttcgaaaaaccgttttgggataccggcgatttcccggaattcgccagcgacgaatatgccgccgtggcattgcaggctgccgtggagtcggagatactgctcaagaacgaggacggcctgctgccgctggagcggtctgcacggattctgctcacggggccgaatgccaattcgatgcgctgcctcaacggaggatggtcgtattcgtggcagggcgaccgctgcgatgaatttgccggagattacaataccatctatgaggctttatgcaataaattcgaccatgtggactatgtccccggtgtggagtatgcgccgtcccgctatgacaactggcaggaagaatgcgtgacagggatcgacaaggccgtgtcggcggcagccggagccgatgtgattattgcctgtataggcgaaaattcctactgcgaaacgccgggcaacatggatgacctgaacctttctcagaaccagaaggaactggtgtgggcccttgcggcgaccggaaagccgcttgtgttgatcctcaatgaaggccgcccgcgcgttataggcgatatcgagccgcttgcgcaggccgtggtcgacatcctgctgccgggcaattacggcggcgatgccctggctgacctgcttgcgggggatgcaaacttcagcgcccgattgccgttcacttatccgcgcatggtcggcgcattggcgacctacgattacaagccttgcgagaatatggccgccatggcgggcgaatacaattacgatgctgtgatggatgtgcagtggccgttcgggtatgggctgagctatacggaatttgcatatagcgatttccgtgtcgaccgccgcatgttcggtgccgacgatgtgttgaccttcacggtcgatgtggccaatgtcggtgaagtggccggcaaggaggccgtgatgctctattcgagcgacctggttgccagccttacaccggatgtaatccgcctgcgtgatttcgagaaggttgcgctcgaaccgggcgaatcccgtacggtgacgttcgctgttccggccagcgacctggctttcgtcgggcatgacggccgatggaggctcgaggagggggaattcaggatgcgctgcggcagtgaaacacttcggatcagctgcacgcaaaccaaagtctgggatacacccaatatcccgtaagtacgattaggtgtaatattgaaaggccgtcctctctgcatgggacggttttttcttgcctcctgccggaattatgcgttgtcgatccggcctgctgccggcccggaaacgggcgacggccttccggggttttgcattatttcggattatttttgtcggaatcgttcgtttcttgcaggcaaatagttatttttgcacaaataaccgtaactgaaatggaggatatcatcaaacttcacgacaaaaagttcaggatcatgatccccgctgccaagatcgacgaggccgtggccgccgtagcctgccgcatcaacgaggactaccgcgacaagccgacgccgttgttcgtgggcgtactgaacggctcgttcatgttcatgagcgacctgatcaagaaaatcgagttcaacaacgagctgtcgttcgtgaagctggcttcgtacgaaggcacttgctcgacgggatgtgtgaagaacctgatcgggctgaataacagcatcgaaggccgccatgtgatcatcgtcgaagatatcgtcgacacgggcgagagcatcgagcacatgatcggcgagctgaagtcgcataaccctgcgagcatcgaagtctgcacgctttttttcaaaccgggttcctaccgcaagcaactgccgatcaagtaccgcgccatggagatcggcaacgagttcatcgtgggctacggcctggactacgaccagttgggacgcagcctgaaggatatttacgtggttaccgaatagatggattccaagaccgatagcgaactgctcgacggcgggcgcaagctgcctctggtcgaagatttctacacgatccagggcgagggcttccatgccgggaaacccgcctatttcatccgcctgggcggatgcgacgtgggatgccgctggtgcgacgccaaatacacgtggaaccccaggctctatcccccgaccgacgtacggacggtgatcgaccgtgctacggcgtgtcctgcgcaggcgatcgtcatcacgggcggcgaaccgctgctttatccgctgggggtgctgaccgaaacactgcacggcaaggggctggagatattcctcgaaacgtcggggacgcatcccttctcggggtatttcgactgggtgtgtctgtcgcccaagcggcagcaaccgccgctggacgaggcgttcgggaaggcgcacgaactgaaggtgatcgtcggggacgaggccgatttcgaatgggccgagcgcaatgccgcacgggtgggagccgggtgcatcctctacctgcaacccgagtggagcgttgcggagcgcatgatgcccgcgatcgtcgagtatgcgaaggcgcatccgaaatggaatatctcgatccagacccataaatacatgcacataccctgatgggcttcgaagtaggcaaaaagttctggatcgccgccacggcggtcatcgtcgtcgtcacgttgttcgtggtggggcggaaccttttgcatgcggtgaagattaagcggcagatcaacgccctgaaccgggagcgggagttttaccgggccaggatcgaacaggacagcacgctgctggagcgcctgcgctacgacgactatctggaggagtatgcccgcgaaaactatcacatgcagcgcagcgacgagcatgtgtacatcatcaaggagtgattttccgatccgtatgacttgacggcgacccggcgggctgccgtttttttgtgttacagccgggcctgccgggatgcggctttccctgcctgtccggaaaatccgggtaggcggccgttggcggcgcccggtcagtaatgcgtgaacccgtgccagtccagggcccggggccggtcgttttcgagccactgcaatttgccgctgtccgtgatgcggccgacggggtggagcggcgtgccgaagcgtgcgcggaaatcggcggcgagcctgtcggcggccgccgcgtcggccgtgagcaggagcttgtaatcctcgcccccgcaggcggctgtttcgacgtccgccccttgggcgagggggatacggccgatgtcgatcgcggcgcctacccccgagcgctccatgatgtggcggatatccgaggccagcccgtccgagagatccatcatggcgtgtacttcggagcgtgcgccgagccagatgccttcggccacttggggctgcgggttacggtgggctgcggcggcgggggtgtcgtagcgtccggcgaggatgtcatgcagtccggcgcccgaaagtccgagttctccggcgacgagtatcgcgtcgccggggcgtgccccgctgcggcgcttgatgtgtgcgtcggcgatgcggccgatggccgtgacattgatcgtgatgcctgccgccgagcgggtcgtgtcgcccccggcgagcgtgacgccgaacgcttcggagagttcccggtagccgagcatgaactcttcggcccatgtaccggccgtgtcggccgggagcgacagcgacagcagggtggccaccgggcgggcgcccatcgaagcgacgtcgctcaggtttacggcaagggatttgcgccccagttcgcggggcgaagttgcggaacgcaggaaatggacgccttcggcgagcatgtcggtcgtgaagaccagcgattcgccctccccgacggggagtacggcgcaatcgtcgccgatcccttcgaacccgttgtcgggcagggcggcgaagagttcttttatgtggtctatgaatccgaattcggtcatggttctcgggtgtgtccggccgcggcgccccgccggccggtgcgggttttcgggtttttcacgtgcggctgccgccccgggggcggagttcccgcctggggacgggaacgaagcctgtgcgagccgcagcaggggcgtgggcggcgtttgaaatcattatttaacgggcgatgtcgaacaaaggtattaaaaattctttaaaatcactatctttgcctgcggattgcgcccgggtgtgccgtgcgtgtcaaacagtctcgaagatgaagatattgattctcaacggcccgaacctcaatttgcaggggcggcgcgataccggggtctacggcacccggactttcgaaacctttttcggggagctcgaagcactctatccggccgtcgggttcggttatttccagtccaacctcgaaggcgagctgatcgacgccgtacagcaggccgacggcacctacgacggtgtggtgctcaatgccggcggatatacccatacgtcggtggcgctgcgcgatgcggtgtcggcggtgtcggtgccggtcgtcgaggtgcacatctcgtcgatcctcgcgcgcgaggagttccgccacgtctcgctcctggctcccgtggccgtgggctcgatcatgggtttcgggctggattcctaccggctgggcgtcgaggccctgttgctccgcggcagggagtaagccccggcttcccggagcgccccattccccggcccggtgggggagggagtgcgtgcggaaggcccctccccggctgttcgcgcggagcgtgtgcaggagcgggcaccgggcgtaacgtgaaatgtcgaaatactaatattttagcatcatacttttatgtatagaatgaaaaaaaccaagatcgtcgcaacaatgtcggatttccgttgcaccgaagagttcgtgaaaaaccttttcgatgccggtatggacgtggttcgtgtcaattcggcgcatgtctcggaagagggcgctacgcatattgtcgagaccgtacaccgcgttaacccggccatcccgatcatgatagatacgaagggccccgaaatccgtgtcacgacgatcgccgacgaatacggtaacagcatcaatttccggccgggcgaccgtgtcgccgtgcgcggctcggacggcagcgacaagacgacccgcaaggtggtttacatgaacgtccccaatatcgtggatgacattcccgtcggggcgcggatgctgatcgccgacggcgaactggagatccgtgtcgtgggaaagaccgccgaggagctgacctgcgaattcgtcgtgggtggcgccatgcgttcgcgcaagagcgtcaacgtgccgtcggtgtcgatcaacctgccttcggtgacggagaaagaccgccggtttatcgagtgggccgtgaagaacgacgtggatttcatcgcacactcgttcgtgcgcagcgccaaggatatcaaggccgtgcaggacatcctcgatgcccacggcagcaagatcaagatcatctcgaagatcgagaaccgcgaagggctcgacaacatcgacgagatcatcgaggcgtcgtacggcatcatggtggcgcgcggcgacctgggggtggagctgcctgccgaggcgattcccaatacccagcggcgcatcgtcgagaagtgcatttgcgccaagcgcccggtaattatcgccacgcagatgctctattcgatggtcaagagcccgcgtccgacgcgcgccgaggtgagcgacgtggcgagtgccatttacgagcgcgtggacgccgtgatgctgagcgacgagacggcgatgggcgacttccccgtggaatcggtggaaacgatggcccgcatcgcccgcgagatcgaacgcgacgagacgcatttcaaaccgatgatcgacatggacatggtctcggtgaaccacgagatcacggcgcagctggcacgttcggccgtgcgtgcctcgaccaacctgccgataaaatatgtggtgctcgacaccaagaccggccgtacgggccgttacctggctgcattccgcgggcagaaaaccgtgatggccgtatgctatcagctgcatgcgcagcgtatcctggccctgtcgtacggcgtggtgccgatcctgcgcaaccaggagctgaaggacaggtaccacttcctgatcgacgcgctggaggtcatcgaacagcaccagaagctcgacgggcaggacctgctggcaatcgtgggcggcagtttcggccccgacggcggtgcgtcgtacgtcgagatcgccaatgtcctcaatatccgcaagcgtaacgaagagatcgttgccgcgcaaaaatcttaggcggtggacgggcagctcagggataaggtagccagcggcgtggcgtggagcatggccgagaaagtcggtacgatgcttctccagctggccgtgagccttacgatcctgcggctgctgaaccccgccatcatgggtgtgatcgcgatcccgacggccttccttgccgtggcgatcgtgattgccgacagcggcttttcgcaggcgctgatccgcaaggggacacctacggccgacgattacaaatcggtcttcgccttcaacgtcggggttgcgctcgtgctttacggggtgctggtagcgctggcggggagcatcgcgcggttctacgacatgccggaaatcacgcggatagcaccggtattcttcctccaactgccgctgagcgccgcatgtgcgatccagaatacgatttttgtccggacattccgcttcgcactgctctcgaaggtcaccttcgcctcgtggttcatcgccgggatggtggccatcggcctcgcattggccgggttcgggatctggtgcatcgtggtgcagcgcgtattgcaggcctccgtgcgggccttgctgttgtggtggctgagcgactggcgtccctgcgggaagtgcagccggcggccgctgcgcgaaatggcgccgtacagtttcagcctgctggctaccgatttcatctcgaccctctataacaaggtgccccagatatttctcgggaaactctatccgcaggagacactcggctcgtacgagcaggccgtcaagctgaaagaccagccggcgacttcggccatgcaggccgtgcagaacgtgaccttcccggcgctggccaagatcaaggacgacgcgccgaaactggccgaaagttaccggcagatcgtcatggtcgtggcctatgccatgttccccgtgatgctcggcctgtcggccatcgccgaggacatgttcgccgtcttcctgggaggggagtggatggcgacggtgccttatttcgaagcggtatgcctggccgggcttttttacccgctggggttggtggcctacaatgtgttgaaagtcaagagcggcggtgcgctgatcgtaaaactggaggtcgccaagaaggtgatgatgtcggtggtattcgccgtgacgattccggtcagcgtccaggccgtcatctgggggctggtggtgatcgccttctgcgagatggcgatcaacttcttcgccacgacccgtttcacgtcattcggcgcaggacgcttcgtgcgcacggtgctgccgatgctgctcgtggccggggcgatgtacgctctcgtgcgggttacggcgctggcggtgccgggcaatgcgttgttgcggttgctggccgaagtcgccgcgggcgtggtcagctacgtcctgctttctgcactgttccggctcgaagccttccgcgaggtggtcgcactggccaggcgccagttcatccgcaaataggccggctgccggggctggccgtcactgccggatatacacaggaaaaacgtccgccggatattgatccggcggacgtttctgttgcggcgcggttccgttttgcagcccggtttctgtttggcgcgcggttcgccgtttcgcacggcgtatgcggtgtccgggagttgctgccttggcggtcgctgccgcatgggcggctccctcgcgtgcgcagctcctttgcccgtcaggcgtagaccttcgggacgatggtgccgcggaggacgaccagtgcgttggcgaccagcgattcgagttcgttctcgccggggtagactgaaacgggggcgatgaacgagcagtgctgttcgatgtaccgcacgacgaactcgttgtgggcgatgcccccggtgaggatgacggcgtcgacccggccgcacatggcggcggccatggcgccgatctgcttcgagatgccgtagcacatggcctcggccacgagccgggctttttcgtcgccctgcgcgatacgctccgagacctgcatcatggaattggtgcccaggtgcgcgacgagcccgccttggccggccagcattttctggacttcgcggcgcgtgtaacgccccgagaagcataggtcggcgaattcgcccgcaggcaggctgcccgcccgctcgggtgcgaaggggccgtcgccgtcgagcgcgttgttgacgtcgacgacacgtccctgtttgtgcgcggcgacggagatgcccccgcccaggtgtgcgaccacgaggtttgccttttcgtagacgatgccgatgcggtcgcagtgcaggcgtgccgtggctttctggttgagtgcgtggaagatcgatctgcgcgggcagtcgggatggccgctcaggcgtgccacgtcctccatctcgtcgacgaccaccgggtcggcgatgtaggctttgacgcccgccatggcggcgatctcggcggccagcaatccccctaggttcgaggcgtgttccatcgtggcgttcgtcaggtcgcgccgcatggcttcgttgacttcgtatacgccggccgggatggggcgtacgagcccgccgcgtccgatgacggccgacagctgcatgatgtcgaacccgtgttcggacagcgccgtgagtatcatttcccggcgccagtccagttggtcgatgatgttggcgtaacgtgcgatctgttcggccgtgtggcgcagggtcagatccaacgaaggccgctcctcgtcatagagggcgaccttggtggacgtagagccgggatttatcgctaagattttgaagcccataaattcggttccggttagtagttggtaggttggtgtaggtgtgtgcctattgttttacggccaggcaagccagtgcgatcgagtagagtttggtcttgctcgtgtcgccgcgcgaggtcagtacgcagggcaccttcgtgcctgcgaccatggcggccagttcgcctccgcagaggtgcgtcaccgacttgaagaagacgttggccgactccaggttggggaaaagcaggcagtcggggtcgcccgctacagacgaacctttgactttcttgtgctcggcgacatccttgtagagtgctacgtcgagcgacagggggccgtcgatgatgacgttgcccagctgtccacggtcgcccattttggcgagcagggcgccttcggtcgacgaaatgacgctggggagcagctgctcggagggggcgatgcaggcgatcttgggggtttcgatgcccagcaggttggcgacttttgcaaggtagccgatctgcttgatcttctgtttgaagtcgggcagcgggatgaccgcgacgtcggagatgaccagcagtttgtggtagcagggcatctcgacgatcgacacgtggctcagcacgcccttcggggggaacaacccggcttccttgttgaggatgccgcgcatgtacttgtcggtcgagacaagtcccttcatcagcacgtcggcgttgcccgccacgacggcggccacggcctgctgcacgcatttgacgtcgctggcctcgtcgacgatgttgaatgccttgatgtcgatgtcgttttcggcgcatacctgctcgatgactttcttctcaccgaacagcgtgggctccacgataccttccttgtaggcttcgtagacggcttccagcgtatgcgaatcctggccgtaggctacggccagccgttttttacccctttttctcgcctcgtcgacgatttctgtaagatgttggatcattgtggtgttgtgcttttatttattttaccagattgtacgtgtcggtggcgatgaccagttcctcgtcggtggcgatgacggcgaccttgacccgcgaggagggtttcgaaaggattttgtccacgccgcgggcgcccttgttggctgcgcggtcgaactcgacgcccatgaattcgagccccgtgcagaccgtctcgcgcatctcgcacgaattctcgcccacgccgcccgtgaagacgatcaggtcgacgccgcccatttcggcggcatactccccgacgaatttgcggatgcgcccgtagtgcatgtcgcgggcgaggatggcgcgggggttcccttcgtcgtaggcgcggtcgatgtcacgcatgtcgctcgaaaggtcggtgagccccaaaacgcccgatttcttgttcatcatctcgttcacctcggcgtaggacatgccctccttttcgccgatgaaggtgatggcgctggggtcgacgttgccgcagcgggtacccatcaccagcccgtccacgggcgagaagcccatcgacgtgtcatgggacttgccgttgagcacggccgtgaccgatgcgccgttgccgatgtggcaggtgatgatcttcgaattctcgaagtcgaggcccgcgagccgggcaccggtctgtgccacgtatttgtggctggtgccgtggaagccgtacttgcgtacgcggtacttgtcgtaataggcgtggggcagggcgtacatgtagtttacggccgggatagtctggtggaacgaggtgtcgaagacggtgacctgcgggacgcccggcaggactttctcgatcgacagcacgccttcgaggttggccgggttgtgcagcggtgcgatttcgaacagtgaacggatcttggatttcacctcctcggtcacgatacagctctcggggaagaactctccgccgtgcgccacgcggtggccgacggccttcacctcgtcgagcgagccgatgacgccgtgtgcggggtcggtcagcgcgtcgagcaccagtttgatgccggtggtgtggtcggggatggggcggtgcagctcgaacggttctttgccgacgggcttatgggtgaggtcgccttccggcaggccgatgcgttccacgattcctttcgcgagcagtttgctcgatgcggcttccatgtcgatcacctgatacttgatcgacgagctgccgcagttcaataccaaaattaccatttctctttatagttaatttctaaatgtcgttcctatccacatgccggcggctgcaaaaacaatgcataccgccacgctcagccccacataggtcgccgccgccgtgtaacactcctcgcgcagcaggcgcaccgcgtcggccgaaaaggtcgaaaaagtggtaaacccgccgcagaaacccacgatgagcagccatccgagcgtctcggagctggtcgcttcgagcaggatgccgatcagcagcgaacccgcggcattgaccgtgaacgtacccgccgggaatcccagcagcgtctgtcccgccatgattccgccgcaaagcaggtagcggacgatgctgccggcagcgccgccgcatcctacggccagaagttcacgaatcataagttaaatatacaccaaattttaaggatatgcaaatttacagaaaaaatgcttacggattgttatttttcctgccgttttttgaggtttttttgtcgtatcgggatttaaggttggcggatttgtccgtcgcccgagacgatatacttgtaggtcgtgagttcgggcagtcccatcgggccgcgggcgtggagtttctgcgtcgagatacccacttcggcgccgaagccgaactgcccgccgtcggtgaaggcggtcgagacgttgacgtagacgcatgcggcgtcgacgctgcgcgtgaactgcgtggcggcctgcttgttttcggtgacaatggcttcgctgtggcgcgacgagtagcgggcgatatgcgccagcgccccgtcgagcgacgcgacggttctcacggccagtttgtagtcgaggaactcggtgccgaaatgctcttcggcggcatgttccagcaacccggcggggtagtgcccgtcgagggcggcgaaagcctcttcgtcggcgtagaccgtcacatgcgccccggccagcggtgcgcacagctccggaaggtcggtgaggcggccgcggtggatgaccaggcagtcgagggcgttgcagacgctcacgcggcgcgtcttggcgttgcagaccacggcacgtcccttttcgaggtcgccgtcgatgtcgaaataggtgtggacgatgccggcgcccgtttcgatgaccgggatgcgggcgttctcgcggacgaagcggatcagccccgccccgccgcgcgggatgactacgtcgacatagcccacggcgctcagcagcgcccccacggcttcgtgccccgcggggagcagcgtgaaggtgttttcgtcgatgccctcggctgcgagtgcttcgtgcagcagcgccgcgatcgcctcgttggaatggcgggcgtcgctgccccctttcaggacgcaggcgttgcccgtcttgacgcagagcgcgaagatgtcggccgtgacattggggcgggcttcgcagaccatgccgaccacgccgaacggtacgcggcgcttgacgatggtcatgccgttggggcgcgtccagcgcgccagttcctcgccctgcggcgaacgcaggtgcgaaacggcctccatgtcggaggcgatggcgtcgatgcgttcgggggtcagccgcaggcggtcgagcatgggcgacgaggcgggcatggcctcgatgtcgcgggcgttggcttcgagcaatgcgggcgtatgcccgcgcaggagccttgcggcgtgttgcaggatgcggccgaggcgttcgggttcgacgtcggccagcgccgtcccggccttccgggcggccttgaacagggattcgtagtccataatcgtttattccatgtagaggtaatcgcagtggacgaggggcttgagtcctttgcgtccgatgttgcggcgggcggtgccgctgtcgcacgagatgcgtcccacggccagttgtgccccgtcgggcgagaggatgcgcaccaggtcgtcgcgctcgaagtcgccctcgacggctgtgacgcccacggcgaggatgctggcggccttgctggcgcggacggcttcggcggcgccctggtcgatgcgcagcacgcccttggcgaagccttcgctgctggcgatccatttcttgacgcccgaggctgccctcggagccggttcgaaccgggtgcagggcacatcctttgcggccagtacgaggtcggtgaggatgccgtcgcggcggccgttggcgatgatgacctcgatgccttcagccgcggcgcgcgacgagacgcggctcttggtggccatgccgccgcggccgcgcgacgagcgtacggggtcgatgtactgcgagaggtcttccgagggtttcacacggcggatgacctgcgatgcggggtcggcgggcgagccgtcgtagatgccgtcgatgttgctcaggataatgagcgcttcggcgttcatcatggccgcgacgagccccgagagctcgtcgttgtcggtgaacatcagttcggtgaccgagatggtgtcgttctcgttgacgatcggcagcacgccgttggcgagcatcgtctccatgcagttgcgctggttgaggtactgccgccgtgtggagaggctctccttggtggtgagcacctgcccgcagacgatgccgtattcgttgaagaggtcgtagtagcggttgagtagcttgacctgccccacggcggagaagagctgccgtgcggagaccgaatcgagcttcccggcgcgttgcccgaggatgctgcgccccgaggccacggctcccgacgaaaccaggatgacctcggtgcccgcgcggtggagccgggccacctggtcgaccagggccgagatgcgggtggtgtcgggacggccgtcgtcgcgggtcagcacgttgctgcccaccttgatgacgatgcgccggtatttgttctgtgtgtccatatgcgtttcattcgccgggaatggcccggctcagggttcgaatttgtagcccacgcccttgatggtgacgatgcgttcgtcgccgatcttctggcgcagtttgcggatgtgcacgtcgatggtgcggtcgcccacgaccacctcggtgccccagatcttcgtatatatctcttcgcgcgagaagagcttcccgggcgacgaatagagcaggtcgagcagcgcgaattccttgcgcggaagggctatctcgtggccgtcgcgcgtcacggtgtaatgctcgcggtcgacggcgatgcctgccgcggcaggttccgccggcgcggtttcggcgtcgatccgcttgaggatggcctgcacgcggctgaccagcagcttcatcttgatcggcttggtgaggtagtcgtccgccccgacgccgaagcccgtaagctgctgatcctcctcgcccagcgccgagagaaataccaccatcgtgtcgcgcagctgcggatcctggcggatggcacggcaggtctgcgcaccgtccatgacgggcatcatcatgtccagcaggatcaggtgcggacggcactcggcggcggccttcagcgcctcggcgccgttctgcgccgtgaatacttcgtagccctccttctggagggtgtacctcacgaattcgaggatgtcgatttcatcgtcgacaagcaggatgcggtggctcatggttccggttgacaggttttgtatcgcacgcggcaattgggcgcggttgcgtgccgctcatatctcgggcgaagttagcaaatttccggctaaatcgttcggtagcccgggaaaaatggttatatttgcgagatttatatacttccgtatatatggaaatcaaaaacgtgtactgagatggctactgaaaatccgaatcttcctgctcccgaggagcgagtcagcgatgctgctgaagatgtgcagaccgtaacttccgaagtgacttccgaagtccctgaaaccgaggcctccgcagcagcggaggcggaacccgtcgtggaaacacccgcggcagaagaacccgagacggaaaaatccgttgcgggaacgcccgcggcagaggtgcccgtggctgaagcgcctgcggcggaggagcccgtggcggaacccgaggccgcgccgcgtgcgaagcgtgcccgtatcaagcccgttgccgaggcggtggagaccgaatccggcgaggaggccgtgccggccggtgccgaagtggatttcgcggacgaggaggcggcgctcgccgcgcaggatgccgggctggaactggagggcgagacggctgaagaggccgctgccgaccaactggcccaggaagcgccgtccgccgaggacaagtttgccgggaagggcaaggaagagctggtagccctctttatgcgtatgctcgaagagcagcccgtgcagtcgatccgccgggatgtggaggcgctgaagatcgctttctaccgcatccgccgcgccgaggtcgaggccgcacgccgcaagttcgtcgaggaggggggcagcgaagaggatttcgcaccggccgtggacggcgccgaagtacagctcaaggagttgttcaaggagtaccgccatcgccgcgacgagttcatcgcaaacctcgaggccgagaaggagaagaacctccaggtcaagctcgggatcatcgaggagctcaaggaactggtcaattcggacgagacgctcaaccataccttcaataagttccgcgaattgcagcagcgctggaaggagaccggcatcgtgccgcagcagaacgtcaaagacctgtgggagacctacaacctgcatgtcgagaatttctacagcttcatcaaaatcaacaaggagctgcgcgacctcgacctgaagaagaactacgagcagaagatcgccctctgcgagcaggccgaagcgctggtgctggagccttcggttgtggaggcgttccacaagctgcagaagctgcatgacgagtggcgcgagacgggccccgtagccaatgaatataaagaggtgctctgggagcgcttcaaggcggcgtcgagccgtatcaacaaacagcatcaggagcatttcgaatcgctcaagggcgagcaggtcaaaaacctcgaactcaagacggagctttgtgccgccaccgaggagctggccgcgcagccgctcacgacccgcaaggagtggaaccgtgcgagcgaccgcctgctggagatccagaagacctggaaaaccatcggcttcgcacccaagaaggacaacaaccgtatctacgagcgtttccgcacggcatgcgacaagttcttcgaggccaagcggcagttctatgccggggtgaaggccgagatggagcacaacctgcagctgaagaccgagatatgcgaggccgccgagtcgctgatgaacagcgaggagtggaagaaggccacggacgagctgatcgccctgcaggcccgctggaaggagatcggtgccgtgtcgcgccgtcattcggatgcgatctggaagcgtttccgtgccgcatgcgacaagttcttcgagcgcaaggcttcgcattttgccagtgtggacggcgagcacgaggagaacctccggcagaaactcgccttgctcgatgagatggccgcggccgacgtcaaggccggcggatacgacgtgatccgcgagttccagcgccgctggggcgagatcgggttcgtgcccatcaagcagaaggatgccatccagaagaaatacaaggccgccgtcgatgcgctgttcaacacgctgcgcggttcggagcgcgaccgttcgatgaaccgtttccgcgagaaggtctcgacgctcaaatcggcgggcagcaaccgcctgcgttcggagcgcgagcgcctttacaataaggtgcgccagctcgaacaggagatcggcctgctggagaacaacatcggtttcttcgccaagtcgaagaacgccgaggcgctcgtcgccgatgtgaaggccaagatcgaccgcgcccgcgaagagatggccgccgcgatcgagaaggtgaagctcatcgaccgccaggcacaggaggagaaccaggagcacaacgaaaataaatagatatagtcagtaatgaaactttccaaacccaagtacatatttgttacgggcggtgtcgcatcgtcgctcggcaagggtattatttcggcctcgatcgcccgcctgctgcaggcccgaggctattcggtgaccatccagaaacttgacccctacatcaacgtcgaccccggcacgctgaacccctatgaacacggcgaatgctacgtgaccgaggacggcgccgagaccgacctcgacctggggcactacgagcgtttcacgaaccagcccacgtcgaaggccaacaacgtcacgacgggaaagatctacaagagcgtgatcgagaaggagcgcaagggcgagtacctgggcaagaccgtgcaggtcatcccccatatcaccgacgagatcaagcgccgtatccagatgctggcgcagaagaaagtttacgacgtgatcatcaccgagatcggcggtacggtgggcgacatcgagtcgctgccgttcatcgaatcggtacgccagctgcgctattcgctgggctacaagagcacggccctcgtgcacctgacgctgatcccctatatggccgcttcgggcgagctgaagaccaagcccacgcagcattcggtcaaggccctgctcgaaaacgggttgcagcccgacatcctcgtgctgcgcacggagcatccgctgtcgaccaacctgcgccgcaaagtggcgttgttctgcaatgtcgacgccaacgccgtgatggagtcgatcgacgtgccgacgatctacgaagtgccgctgaagatgcacgaacagcacctcgacgaggtggtgctcgacaaactgaacctgccggccgagaaggaacccgacatggcggcgtggacggccttcgtggagaaggtgaagcacccggccaagaagatcgagatcgcgctggtcggcaaatataccgaattgcccgacgcttacaagtcgatctgcgaatcgttcatccacgcaggcgccgtgaacgactgcaaggtcaagctgcgctatgtcaattcggagaagatcaccgctgagaatgtggccgagaagctgggcaggatgtccggtatcctcgtggctccgggcttcggcaaccgtggcatcgaaggcaagatcgtcgccgtgcgctatgcccgtgagaacaagatcccgttcctgggaatctgcctcggcatgcagtgcgccgtgatcgaattcgcgcgcaacgtgctgggcatcgccgatgcgaactcgagcgagatggagtctacgccccatccggtgatcgacctgatggaagagcagaagggggtgacggccaagggcggcacgatgcgtctgggcgcttatccctgtacgctgaagaggggttcgaaagtcgcggcggcctacggcaaactccatatttcggagcgccatcgtcaccgttacgaattcaacaacgactatatggctgcgttcgaaggtgccggtatgcaggccgtgggcatcaaccccgacacggggctggtcgaggtcgtcgaggtcgagggacatccctggttcgtcggtacgcagtaccatcccgagtacaagagtacggtgttgagcccctcgccgctgttcgtggcatttgtgggagcggcgctcgaatatgccgggaagaaatagtaacaacacttatcacagcgaaagaacgaaacatttttaaatggataaaaaaacaattttaggtattgtcgtcgtggcggcgcttttcctggggttcgcctatttcaataccaaacagcaagagaaatatcagcaggaaatggccgcgtatcaggcctatcaggattctgtggccgctgcgacgcgccccgtagtccccgtagccgacagtacggccgtggcggcttcggatacggctgcgcccgaggctgcggcaaatgccgccgatgccgtacgccggcagcaggtcgctgcgctgggcgaatacctcgccggtgcgcgtgacgcggaggcggaggagtttaccgtcgagaacgatgtgatgatcgtgaccttttcgacccgcggcggccggatcacgggcgtgacgctcaaggattataccaagtatgcaccccgcggcaagcgtgaccagctgatcgagctgatggatcccgcgagtgccaggttcgacctttcgttctacgtgaagaacgggttgaacaacgtcaaggtcaacacgatggactatgtcttccgggcgcagcccgagcaggtcgaaggcgatgcccggagggtggtgatgcgcctgcccgtggcagcggatgcctggctcgaatatgagtaccttatatataataagcaggtgcccgagcgcgactacctcgtggacttcaacgtgcggctggtgaatatggcgccgcagatggccaaccaggcgtcgatcggtatcgactggtcgaacaattcctaccagaacgaaaagggattccagaacgagaacatgtacacgacgatttcgtaccggttcccgggcgagagctcgatcgaggatctggggatgagcgaaaaatccaagtcgaagagcatctccacatcggtcaactgggtggctttcaagcagcagttcttttcgtcggcgttcatcgccccgcaaaatgtcaccaacgccaatctggcgttcgatacggcggctcccggttcggaattgctgaagagtttttcggcgcagatgaccgtgccctatacggtgcagaccgaagggtatgatttcgcattctatttcggcccgaacaaatacgccatcctcaagaaggtcgtcgctgcggacggcgaggaactgcacatggagcgcctgatcccgctgggatggggtatcttcggctgggtgaaccgctggtgcgtgatcccggtcttcgacttcctgcgcaactatatcgccagcttcggcatcatcatcctgatcctggtgatcctggtgaaactcgtcatctcgcccctcacgtacaagagttacgtttcgatggcaaagatgcgcctgataaaaccgcaggtggacgagctcaacaagaaataccccaagaaggaggacgccatgaaaaaacagcaggcgacgatggagctctacaagaaagcgggcatcaatcccatgggcggatgtatccccatgctgatccagatgccgatcctgatcgccatgttccgtttcttcccggcttcgatcgagctgcgcgaacaaccgttcctctgggccgacgacctttcgtcgtacgacagtatcgtgaacctgccgttctcgatcccgttctacggcgaccatgtgagccttttcgccttgctgatggccgtgtcgctgttcgggtattcgtatttcaactaccagcagacggcttcgtcccagccccagatggccggtatgaagttcatgatggtctacatgatgccgatcatgatgctgttgtggttcaacagctattcgagcggcctttgctactactacctgctgtcgaacctctttaccatcggccagacgttgctgatccgccgcatggtcgacgacgataagatccatgccgtcatgcaggccaatgccgccaaacggagcaagggcaagaagtcgaagttccagcagcgctacgaggagctcctccgccagcaggaggcgcagcagcgtaccaaacgcaagtaaacggttcgcaccggcgcagggccggcagcggggattgccggatacggcgcaggccgatgcgtgaagcccggtggcccgcgcggttccgcgaagcccgacgatacgcgatatgaataggccggaggcggttcctgcgatgcgggtttccggctccggcctcgtttttgctccgtcgggtttgcgatcgtatatcccgactacgcggcggcggccttttcaggtgttgccgggcgtcgaggcagaagtctcctcgggaagcgctcaggggaggagcgggccgcgggcgcagccggggcggtacataacagctgccggggcgcgtagccgggggatgaaaaaatccgggcagcaaggccgaagttgcctcggggcgagacggagtttcgggcgcggcccgagagggggcacgacagctgccggggtacgaagccgggtgtgaatccggggcgcaggatttggagcacggaaatccaggggcgcagagtggggaacgaaaatccgggccgtgaggccgggcgtatcaagtatatgattgccaaatagtattgcagataacgatgaaacgaactttttttgtattgctcctgttggcggccggaaccgcactccgggcgcagacactgggcggggagtatcgcctgtcgcgggttttcccggtcgaaggccggcaggggatcgccgctgactcgaactactattatgtttcgggcagcacggtgctctacaagtacgacaagcaggggcggctggtcgcccgtaacgggcagccgttcgaagggttgccgctcgccgcgaaccatatcggcgatatcgacgtatggaacggtgagatttatgccggcatcgagactttcgaagacggcaagggtgagaatatccagatcgccgtgtacgatgccgacgacctgacgtggaagcggtcgatcgattgggaaccggcttcggggcaggtcgaggtgtgcgggctggccgtagaccgcgaccggaatatggtctggatggccgactgggtcgacgggcgctacctgtacggttatgacctggcgacgggcaagtatgtgcgcaaagtccacctgcgcccggtgccgcagtggcagcaggggatatatatggccggcgggcagatgctcatttcggccgacgacggcgatgccgacctggacgagccggacaacctctatattgccgacctgcgcgacgggaaaagctatgctgcggtgttgccgttccgtatgatgtccgatttccggcgcgcgggcgagatcgaggggctgaccgtcgaccctgcgacggatgagctgctggtactttcgaaccggggttcgcgcatcgtgctgggaatggtcaggggtttctacccggggtacgacagcgaactgcacgaagtgtatgtctatgaaaaggtaaaataggaaaagtcccggaagggacttttttttgttgagggtatgtgccggatgccgatctcgttgtcgccagccgatgcctttgcgggcgcatttccggggggggcgattggctcccctgtcttgcttgcggggcgcccggttccgcggatgggcgtttcccgttgctcgttgtgggagcgtccttattttgctgtcggctgacaacgttttgccgacggctgacgacagggggctgtccgcgggtattcgcttgatttgccgggcgggccctggccgtcgctatatcttttcccgttcccgctcttcgaggatggcgtcgaaattttcctctgcccacccgataagcgctgtgaggtggggcatgagcgactcgccgcggggcgtgagcgcatattccacgcggggcggcacctcggggtagaccttgcgcgacagcagcccgtcctgttccagcttgcggagtgtcgatgtgagcatcttctgcgagatgtcggccgtccggcggtggatttccgaaaaacgcaggcacccgctcgtatggaggttgtagagtaccagcagcgaccacttgtccccgaagcggtcgacgatatggcggatcgggcagtgggcgtaggtcgggtgtgcggttttttccatgtccgttcggggcggtctttccttattctacatacaacaccagtcccttgaggtactcgccttcggggtggtagatgctcaccgggtggtcggcgggctgcgtcagctggtgcaggatgcgcacgttgcggcccgcgatggccgcggccgagaaaatcatcgtgcggaacagctccttcgacaccgcctgcgagcaggagaacgtgaagaggatgccgccggggcgtatctgcgatatggcgcgggcgttgaggcgcttgtagccctgcatggcattacccagcaccttgtggtgcttggcgaaggccggcgggtcgaggatgatcaggtcgtatttgtcttcgatgtccttgaggtactccacggcatcggcggccgtttccgtaaagttggcctgcgggccgaagttgagtttcatgttttccgtggccagcacgacggcgcgttccgaagagtccaccgagcagaccttctcggcgccaccggccatggcatagaccgagaagccccccgtgtagcagaaggtgttgagcaccgtgcgccccttcgagtagcgtttgaccagctcccggttttcgcgctggtcgaggaagaacccggttttctgcccctgctcccagttgacgaggaatttctcgccgttctccgtcaccacgtgcgccgaatggtcggaacttccccacaggtagccgtccacagcacccagcttggcgttgaagggcacggtttgcgaactcttgtcgtagatggccgtgatgcggtcgccgtaggcagccaggatcgcccgcgcgatgtcctggcgggcgaggtacatgccgacggagtggcactggatgacggccaccgtgccgtagatatccacgaccagccccgggagcccgtcgccttcgccgtggacgaggcggtaacagtccgtgtcggggttgtccgtgagcccgagcgtgcgccgcacgtcgtaggccacggcgatgcgccggttccaccagtcctggttgatcggttccttgtcgaatgtaagcacacgcacggcgatcgagccgatctggtagtgtcccagggcgatgaaatcgcccgtgcgggtgtatatttcgaccagggcgccttccgtgatttccgattcgtcttcggccttgatgtggtcgatggcgcccgagaaaatccacgggtggcggcgcatgagcgattcttccttgcctttgcgcaggtatacttgaggtgtcataattcgggatgtttgattttgggtgtgtgaagcagtcggtcgtagatcgccgtgcagacccacgcatcggtcgcggcgtagagtttttgtttgtcggtgaatgtcgcggcctcccagttactcagccgctgggccttcgatacgcgctgccccagcacgatggccgagagtttgcgcaggctcttctccccgatgccccattggggggctatcgtttgcaggtcgacgaaccctgcgtcgcggaaatggcgtatctggcgcagcgagcgcaggtcgcccgcgacgtcggcgccgattttcaggatatcctgactttcgagcacctgcaggatcggcttggcgagcgggatcttgttcagccggaagaggaagcatagctgcggcgtggagagttgcagcagcgacacgcggaacgtcacccccggccggaacgacgggcgggtctcggtgtcgaaaccgatgacgcgttgtttcatcaggaatttgcaggcggggacgatgtcgcgctcgttgtcgacgatgcgtatttcgcccctgaattcgatggccggaagcgctgcggcctcctcgttgctgatcttatccgtaaagttgtttgtcgtagtcatgccgtggaacattctcacaaaaatacggaattatttccggaaaacggcatgcggggcgattttttacatccccgcgggcggttgcggccctattttaacccgatttttccatccctgcccgtgccggcgatgccttcgtcgagcaattcgcgcagcgcccggcctatctgctgtgcctccccggggaattccgcggccagttcgtgcgggtcggctgccccgcgggatagcctttgccgcagtttttcgcgcagcccgccgtcggccgacggcgtggcgcagccctgtgcctgctgcttcccggcacgtttgtgtgcgaggcagatgtcgcatacgccgcatgccgcaggggcgccttcaccgaaatacccttccagaacggcgctgcggcaacgggtctcgttcgcggcgtaggcgagcatgtgttcgaagcgttcgcgcatcagctcctgccgccgtttgtaggtctcgggggcgatgtagaggtcggcgcggggcagccgctcctcgtccatgaagaggatcggcgagcggttggaggggacgtagcggatcacgcgcaactgccagaggcgtttgagcagctccttgacccgctgtacggtatagccgctccaggtggcgatctcgccctcgtcgatctgccggaattcggtgaagaccccgttgtagaggcgcagcagcgtgcggatgaagtgatccagctcgtcgcgctgcacgcggagtttgtagaggtcgtcgcggctcacgcagaacatgatccgcgccgggttctcctgtgcgtcggtcagcgtcatgtacccgttttgctgcaggagcttcagggcgcttacgaccgtgccggagtagaggtgctcgcgggcgcagaagtcgtggatgttgaacaggaacgacgcctgggcaccgtcgccgatgccgacctgcaggtaggagcagacccgttcgtagatgtccttgatcttttcgagcggcgggaattcctgctcgaaacgccgcacgatgcgttcgccgtcgtccgacgagaccagcagcagggcgtagctccgcatgccgtcgcggcccgctcggccggcctcctggtagtagctctcgagcgagtcgcacatgctgtaatgggcgacgaagcgcacgtcgggtttgtcgatgcccatgccgaaggcgttggtggcgaccatcacgcgcgtcctgcccgagacccactcctcctgccgcagcgagcgttcggcatgccccatgcccccatggtaggccgcggccgttataccctccctgcgcagcatgtcggcgacctgctcggtgccttcgcgcgtacggacgtagacgatgcccgagccggggacgttacgtaccaggcgcagcagctgcccgttcttgtcgtcggtgtggcggacgctgtacgaaaggttgggacgtgcgaagctgctccgcaggatatgcggttcggcgaaccgcaggtggcgcatgatgtcttcggccacgagtttcgtggccgaggccgtgagcgccagcaccgggacaccgggcaacttctcgcgcagctcggcgatacgcaggtacgaagggcggaagtcgtagccccactgcgagatgcagtgggcttcgtcgacggccacgagtgatacgttcatgcgcacgacgcgcaggcggaaggcttccgtcgcgagccgctcgggggcgacgtaaaggaacttgacgtcgccgtagacacagttgtccagcgcgatgtcgattgcacgcggcgagagccccgaatggatcgccacggccgggatgtgccgtgcccgcaggcggtcgacctggtctttcatcagggcgatcaggggcgtcacgacgatgcacagcccctcctgcgcaagtccggggatctggtaggtaagcgactttccgccgcccgtgggcatcagggccagggtgtcgcgcccgtccatcaccgaacggatgatacgctcctgtacggggcggaattcggtgaagccccagtagcgtttcagcacgtcgtatatcttgtccgctgccctttccatgaatacaaaggtaggaaaaattaggtgtttcccggaattttttatacttttgcatcggattagacgttcgacaaatgaagataagcgaaaatttcaaagtgcgcgagatggcgggggagcatgtgatcatcatgccgggccgctgcggtgccgacatgacccgtattctggcgctcaacgattcgtcgctctatctttgggaggcgctcggcggcaaggactttaccaccggggatgcagccgccctgttgttggagcgttacgacgtggacgaagccaccgcacagcgcgatgccgaggcctgggctgcgaagctcgccgaatgcggcgtgctggagtaaccggcggcacgtgtccggcgtacggacggaaaacttgaaaggtagcatgaaattgaaaagactcatatcgctgttgctgctcgccatctacctgacggcgtggggcggccctgcgtatgtgtcgctttcgtgcaagtgcgtcacgatgtcgtcgcatgtctgctgccaccactgccagcacggcgccgatgccgcgggtgccggcgagtcgctgaaggctccctgctgcggcaaccaccattcgaccgaaatcgaactctatacgggttcctcttccgataaccacgagaaattcatccgctgcacggtcaccgacctgccgcccgcattggttgcggaggctccggttgcggccgacctcaagcttttcggggagacgcttcccgaacgcggcgctcctttcgtcatgcggggccatgtgcgctccgcagggcttcgtgcccctcccgcattggcttaaaacctttttgggacggatgctgcgcgcatccgcccgcaaatagttttaaccaataacggaatgtaatgaaaatcaacaaaatcattttatctgtttcttcccttgccgtgtgcggtaccctctgcgcacaggatttgcggggtgtagtccgcgacgccgacaaccagccgctggtgggcgcttcggtttactgggagggtactacgatcggtgccagcaccgatgcccagggggcgttcctgctccaccgggtaaaaggttacgacaatctggtcgcctcgtatctgggatatgtgaacgacacgctgcgtgtggcaggcggtgcggagcgtatcgaattcacactcgcttccgaaggcgtagcgttggaggacgtggtggtcgagggtaacctgagcggcaacttcgtcaagcgtgacggcatcgtcaagggcgagatgatctcgttcgcgggcctctgcaagatggcctgctgcaacctggccgagagcttcgagaactcggcgtcggtgaccgtcgggtacagcgatgccatttcgggcgcacggcagatcaagatgctcggcctggcaggtacctacactcagatactcgacgaaaaccgcccgatcatgcgcgggctgagcgccccctacggactgagctacacgcccggcatgtggctcaattcgattcaggtatcgaaaggcgtggcgtcggtgactgccgggcatgaggccatcacggggcagatcaacctcgagcaccgcaagccgacggacgacgagaggctgttcgtgaacctctatctggacgacgaactgcgccccgaggccaacatctcgacggcgttccccgtcacgaaggacaagaaactgtcgagcgtcatcctgctccacggttcgatggataccgacgtccgcaagatggatcacaacgacgacggattccgcgacctgccgatttccgaccagatcaacgtggccaacaagtggctttatgcggccgataacggtacgcagatccgctggggatggaaattcgtacaggagaaccgcctgggcggtatgctcgactacaagaattcgatgcgcgacgagatggagaagaactgggactggaaggagacgggcgccgatatgcccctctacggttcgaagatccgcaaccgcggcgcgaacggttattttaaaataggtatgcccgtcggcccgtcggtctacgatgccgacgagcaggatgagatgcgttcgaacctggctttcgtggccgatttcgaccacttcaacgagaacgcctatttcgggctgaacgactaccgcggcaatgagaatacgctctcgctgaacctcatgtacaaccactatttcacctaccggtcgtcgctgatcgtcggtgcacagggacatttgcagtactaccgcgagagttttgccaacaacaccccgtggattgcggcggctccggctacgctctacgacttcgaccgcaacgagcaggaagtgggtgcctatgccgagtatacctattcgatcaaggacaagttctcggtcgtggcgggtatccgcggcgattacaatgcgttttatgacaagttcttcgtgacgccccgcgggcatatccgctggaacatcaccccctcgaccacgctgcgcggctcggccggcctgggataccgttcgaccaatgtcatcaccgacaacatcggtatgctggcgaccggacggcagatcgtaatccccgatttcgacggtttcaaccggctggagaaggcacttacggtgggcggaagcctcacgcagaccttcgggctggtcagtcccggcgacgcaacgctgagtttcgactatttccgcacgcagttctacaattcggtgatcgccgaccaggagtacagcgccgaccagatcgtgctctataattcggacaagcgttcctatacggatacctaccagatcgacttttcgtggacgcctgtcgaacggttggacatcttcgccacgttccgttatacggacagcgagatgacgatcgaccgccccgacggaaagaccgcccgcgtggaacggccgctggtgagccagtacaagacgctgctcaatatccagtacgccacgaaattccgccgctgggtgttcgacgcgacggcacagctgaacggccctgcgcgcatcccgacgcagacgggcgacctggccgacgacaagtattcgccgcgctacccgatgttcttcgcccagataagccgcaaggtcggcaagttcgacatctatgccggttgcgagaacatcgccgactaccgccagcacgacccgatcctcaatgcggacaacccctattcgacgggtttcaactcgatgaacgtatgggggccgctgatggggcgcaaattctatatcggcctgcggttcaatttgtattgattaacctttaaataaacaccaggatgaagaaaattttaatgctgtgccttgcactcgtgatgggtgtgggcatgtgtgcagcgcagaaggctgccgacaaaaagacggtgacgacggttttcacgaccgacatcgactgtgaacactgtgtcaagaagatcatgaacaatgtcccctcgctcggcaagggcgtcaaggacgtgaaggtcgacctgcccaagaaggaggtgaccgtggtctacgattccacgaaaaacagcgacgataatatcgtcaagggttttgcttcgatcaaagtcaaggccgaaccgaaaaaagccgacacgaagaaataacgccggcgggttttgttatcggaaagggaggacaatattgtcctcccttttgtttcggtcggtgggcgggctcctgtgcagccgtcggtttcccccgatccgctattcactgcccgccgttcggtgcccacagcccactggtgccccttgctcacagccctctgcccattgtccgccgtcggccgtctgctgatcgctgtccattctctgcggtgggtctgccgtctggtatcgtacggcagccgataagggtcggtgcatgccgaacgacggccgggagtgttccgcatgcccggaatccgcccggttgccggtgtgcccggtttatcggtgcgggtgtgcgtttgttttcgcggcattgtgcctgcgcctgcgcaggcagaggtcgagccctgcgagggcgaggaacgtcgcggcgataaagacgtagaacagggacagccgcctgctttcggccgggaaatccggttcgggaagttgcatggagcccaggccgggcaacgcgggtctgtcggggagtgagggcatgtcgggcagatgcagcccgacgccaggttcgtaccataaataccaggcgagtccggcgatcaccgccagcaggcagaatacgcccgccgtgcccagcaaccatgtttcgcgccgctcgcgccgttccgattcgcgttccagccgttccatgaggcgtacgcagaacccttcgggcaactgcgtgcccggagcttgctccagcgcacggcggattatgttatgtttcgtttccatgcagtagcgtatttaccagtatatacagttttttgcggatgcggtgaagacggactttgacgttggactccgacatctgcgtgatcccggcgcattcgcttacggagtactcctcgtagtagaagagcgtaacgagcgcccgctcttcgggctccaattctccgacggcacgggccagtgcgtcgaggtattcctgtcttccctcccaggcatccatccgctcggcttcgctgtcgggcaggttcgccagccgcgcctggtcgatgcaggcccattcgcgtttgcggcgccgtgtctcggagaccgccgtgttgtaggcgatccggaagagccaggtcgggaacgaactgtgcccgttgaacctgtgcaggttgcggaacgccttgaggaaaacgtcctgagccagctcctcggcatcctctgcgcagccgacgatgcgggaaaccagcgtgtagaccacccgcccgtaccgccgggcaaggatggcatacagatcggtttctccgtttacgatccgtcggatcagctccagttcctcctgttgttgcattgctatctggttagacgcattttgcctggaaaggttacatgccgacgccgtttttccggaacttgtaacctttttcgcggagttgcgtctaataaggcaaagatcgcaaaaacgaattggtaatctttaatacttttaaaaattatgatggattttatttttgtccccttggtcgtaggcgtgattacgctgggaatctacaagttcttcgaattgctcgtgtgccgtcgcgagcgccgcatgattattgataaaatggacggcaataccctgatcgactacctgaagttcgtaccgatgggtgtgaggatcggcgctcccgtgtcggtgcgtcccgtgtcgggcggggtgtccggaaccctgaaggccggttgccttttactgggcatcggtttcgggctgctcttcgccttcatgttgctgaactggtgtgcctatgatgcttcgtacgaaatgcggagcatcgtctacggcgggtcggttctctgcttcggcggtgtcggactgatcgtttcgtttgtcgtcgagcgcaatatcgtcggcagggagtgcaaataacccggcttttccggatggaaaaaggagtatccctcttttggggggatactccttttggttttgccgggggccgtgcggcgcaccgggggcggaacggtttgccggagcccggacgcctgccgtttgccggccgggcggccttattccatcggccggatacgcacctcggtcacgccttccaactcccgtacgagacggtcgatgtcggtcttttcctcgacttcgccgtagtggtaggggtagaatatcgtcggccggatcgccttgacggcttcgacggcctggtcgacggtcatcgtgtagggctggttgaccggcaggaaggcgatgtcgatattcttcagcgccttcaattcgggcgtgggttcggtatcgccggcgatgtagatgcgcgagccgccgagggtgaggatatagccgcagtcctcgcggtctttgggatggaattgcaggtgcccgtcggtcgtgttgtaagcggccacggcctcgactttcaggtaatcgcgcggcgtggcgacgctgcccgggcgcatcgtgtagcagttcatctcgaacgcctcggccgacgtgcggtcgcagagtatctcggtctgcggggtctggatcgcttcgacggctgccacgtccaggtggtcgtagtgcgagtgggtgatgagcaccacgtcggccttgggcagggcggcgtagtcggcatagccgcttacgggatctacgtagatgtattttcccccggcctcgatcgcgagcgaggcgtgtttgaaaaaggtgagcgtgatttgcgtgccgtcgcgcgtagtcagcgtgtcggcagggtattcgggagctttctttccgcatccgaaaaacgataggaacgacataagcaataagaattttgggttcatgctcaaatattatacattacaatgccaatataatgaaaaaaagtgaaatattcgtacctttgagccgcaatcgaacccgaaaaaacgatagggacggtttccgggatgtttttcgtaccggttccggcgtactctatagcggcgggcgtcccggcgcaggctgcggacaggaaacaggcatctgcaaggttgcggagaaacgccgggtgccgaagatggcgttccgcgtgccaggcggacggcagcagccggggacggatcgcctggttcaaaacccggacatcccgacgcgacgcccgggccggatgggaggaaccctgccccccccggaggtgcccggggcggccggccgggtcgcggcggtggagggcgaagtccgatgccggaaaaacggcttggagggcggatgggtgtgcggcctctcccggaaggcaggggtgcggggcggaagagccgttcgctgaggttggtacgttgcgtgtgacaggctcgctgccggagtttgtccgtccgggttgccggatgaaaatagaataatttgcatattttttatgccttggcgcagtattttacgaatcgggacgtttataagagtaaagtattattaaaattacatatgatgaaaaaaattttgtttgtggcggcggcggtagcgtcgatggttttcaccgggtgtatcaacgaggacgacacctataagaagttgcaaccggttcagcaggggatcaacatctacaactggacatccagccagtattccatggcgaccgagcaggccaacataggtatgcgtatggcgatgctcgtggccgaagccgacaagcagggggtggaaaaactcgaggacgtgaaaatcgaaggcgtctccatcaagagcaagttgctcggtacttcttcgacgatcgaaaagacgaccaccggttacaaaatcaccttcaatcctgcatatatggatctggacggctattcgcgcgagggtgccgtgctgatcgacacgggcgaggccccgctgctcgaagaggccgtggccggaaaggtctggacggtgacgttcgacgaaaaactggtgctgacggccaccaacggcaatgcgtcggtaaaggcttcgctggtgggcggttccacgcagctctacaacgatgagaacggagcctatgcgatcagcattgcgaaccaggcctgctacctcgattcgggcagcaatttcacttcgaattggggcggccgcatgacgttgaagcccgagaacatgaatttcacctattcggattgcgtgggcgagaagttcgtcgtgaaagagggattgctttacggcccttcgttctatacgatggacaatgcaacgcatctggagctgagcatgacgctctcgaatgtcgagtactatacgaagtcgagcatcagggagggtaagatcgaagcgatgatgaccggcgggtatgattttactgccttcccctcaccgaaagtgacggtgcagtatgccgtgagcgccgacggtaagaaattgctgacgacgattacttacaacgggaatacggtgacgatctgagccatagcggcaaaagtaaaagcggtgcgaaaattcgcaccgcttttttattttccgggcggcctgtttgccgagcggcagggtttccgggcgtgttttgtcgggcgcttgccccggtgatgcccgggtatacggtttcttgctgtcgccccgtggcttgaccgggatttacttcccgtctgttgcctgtgtctggtgctccgcgctttttgactgcctgtcgagccgcatgaccgaggggatgcagaaagccgtgagtccgagcgtgcagatcaccagtcctgcgatgacgaaggtcgtggtgagcccgacctgttcggccaggaaccccgtaccgagcagtccgatagccgacggaagcaacccgaagctgtaatagagcgacatcacgcgccccaggacacccgcgtcgatgcgggtctgtacgactgccacgaacgatgcgttgaagatgccgcccgcgatgccctcgatgcacgagagcacggcgaagagagcgaaggcccccggcgaaagcatacccgacagcgtgaacgatacgccgacgatgaagttcatcaggttgatcaggacgatgcggttgacccggtagacgcgtgcgcccatgatggcgccgccgacaagcgcgccgccgccccatacgatctcaatgaggctcatgtcataggtgctgccgccgaaatgttgcagggtcatcagcgggaacatcacgccgacgggcatgatgaagaagagcacgaggatcgtcagcgtgaagagccatgccattcccggtacggcggtgatggcgctgaatccctcgcggaactccctccaaagattcggtttgagtgtgctccgcacgggattggggatgtgtacgaacagcagcgaggtgcaggcgatgatggcgccggcgacgtccagaagcaggatattgccgatgcccgtgaagctgatgagcacggcgcccaatgccgggccgatgatgttcgacagcgaattgatgatctggttgacgcccgccacccgggtcagctgggcctcgggagccagcagcggcacggaagcctgcatggatggcgaatggaaggccgatcccacggagcggcaggccagcaggatgtagatatgccacatctgcgccacgtcgaaccagaaaagcacggccaggatgagcgtgcagaacgcgatgaagctgtcggccaggatcatcgtgcgtttgcgatcccatcggtcgacgtagaccccgacgaccgggcccagcagcgattggggcagcatacccgcaattgctgccagcgccagcacctcggccgaaccggtctcgatactcatccagaagatgatcgcgtagccgacgaccgagctgctgaggatcgaggcgagctgcccgctccagatgatcccgaatgtctttttccagttttccatgcttgtttcgctgtgatgccaaaaaaggcggacaccgaggtgtccgccgctgcaaacccttcgcagaagggtttatttaactgctttaactattgcctcgaatgcttttggctcgttcatcgccaggtcggccagaaccttgcggttcagtgcgatgcccttggcgttgagtttgccgataaattgtgaataggtcattccctgtgcgcggactgcggcgttgatacgcatgatccacagcgagcggaatgtccgctttttgagctggcggtgtgcatatgcatactgcaaacccttttcgaccgtgtttttcgcaacggtccaaacatttccccttgaaccaaagttacctttggcaagtttcaaaactttttttctacgtgcgcgtgatgcaacggcgttgactgaacgtggcatacttgtaaagtttttgaagagctgtcagcgacgcggttctcccgcgttcttcggggctgattcgctccggttaataaattccgcaggtcggttacttgaccagcaggttcttgattttggcctcgtcggccgcagaaaccgtacccgagtagcagaggttacgcttctgtttcgtcgtctttttggtcaggatgtgactgtgataagcgtgtttacgcttgatctttcctgtgccggtgaaggtaaaacgcttcttcgcagcggcattggttttcattttcggcattgtcgtaaatagttaattagttaaacttagcctgcaaagataacaaaaattcggcataccgcaatcgcggggctgaaaaatctccctctttttattcccgttgcgcagttattgcagggaaacgccgggctgcctgccgcctgtgtccccgggcggtttgcgttcccgataattttccgtatatttggatttgcaaatcaaaaaccgcaggatgatggagatggagtgggattttatcatacgcttgtgcgtggcgggcctttgcggtacggtgatcggcctcgaccgcgaataccgggtcaaggatgcgggtttccgtacccattttctggtggcgctgggcagcgcgctgatgatgatcgtgtcgcagtacggtttcgccgacatcctgacgcatacaggcgtggggctcgaccccagccgcatcgctgcgcaggtggtgagcggcatcggcttcatcggggcgggtacgatcatcatccaccggcagctggtgcgcgggcttacgacggcggcgagcctttgggccacggcgggcatcgggcttgcggccggggcgcacatgtatatcgtggcggctgcggctactctgctgacgctcttcgcgctggaagtgctcacactcgtgttcgggggattggggcgccgcaggacgatggtgatcttttcggctgcgagccgggctgcggtcgacgacatgttcaacgaattgcagagccgcgaatatgcggtgatctcctatgaggtcgaggcgcagcgcggcgcagacggcatcgtctaccgggccaccctggtcatccgtgccaagggaaatgccgatgaagaccgctatatcgacctgctgcgcgagaatcccgacattaccgtcgaacggatcgtctgagccggtcgtacagcacgcagaaaaccattggcacggcaatcccggccagggtatagggtatccaccaccagggcgatcccgtgggaatgaccgggtggcaggccaggctgcggagcgggtagtggcaaacccacatctgaaagagtatcaccagtttgaaaacggggacgtgccaaagcatgatcgccatcgtgtgccgtcccgtatagtccagcatacgtgtcagccagttgccgtatgccgcgaggcggcttgcggcggtgacgagcaggtagcatcctgagcataccagcacgacgaagaacaccgggtttgcgaaaagtctcccgccgaggttgacgcggcagcctgcggctgccgccgcgagcaggatgaccaggcagagcgttgcgatgcgcccgtccagcgggatccgcgcgcggaagatgcggaagagttttccgagatagattatccctgtaatggcgaatgtcctgacggcgatccactcgcccggaatgcccgacggatggcgggcgagcagcatggcgaccgtaaacaggaacaggatggagcccccgcgcagccgctctgccccggcctgcgtcggtgcgagtttccgggtcgccagcgtgatgcagaaaaagagcatcagcccgaggaacagcccttgcagaaaccagaagggcgccagcatctgctcgtggtgcaggaacaggaatacccttcccagcgtccggagcagttccggggtgtcgtagggcaggatggcctcccgggcgctgaagtcgtaggcgatcaggtgccactccaggaatcggttgtgcagcagcacgaagagcgtgcccaggacggcgtagggcaggtagaggcgccggagcttgcggcctatgaaacgccccggggcggcggtctgtccgtcttcgaagaaatagcccgcgacgaaaaagaagacggccgtgttgaaatagtaggtgaaggtttccagcggtgtcaggatcgcggcgtgtgaaatcaccaccgctacgatgccgagggccttgacgatcgagaacgccgtgtcatggtggtgtgtgccggtgcccatcggtcagaaataacggtgcacctcttcgaggagctcctcgcgtgccatgtcgttgggattcgtgccgggcagcccttcgggaacctgctcgccctgttggtcgaacaggtcggcccagaattgcggcagggttccgtccgcggcgcggaagttcatcggccgcgccgtgaaaagcggggtgccgtcttcggcgcggtagctttcccacaccagttcgctgcaatagagtttctcccttccgggccggaacgaataatcgtaggggactccgaggaagctgcgtgcacggcggacggcagccgcgatgccggccgtgtccttcaaccgcatggcaactactgccgggtgtccgtcgatttttgcggagcgtccgagaaattccgccagtaatgtgagccggacgccgccgtcggtcgtggcttcgagcaccgaatcagctcctccgcctacgacggcgatccccacgtgtgagaaattcagcggcccttcttcgcccgtcgcggccgtgatcgccccggtcatctccgtggtttttccggcctggaagagcaggtcgcccgtgtgcaggcgatcgcggttttggccgcaggaaatgaccagcagaagcatacctatatatattaaagcctgtttcatagtctccgccgttcgtttttgcaaatatattaaaaatttttcacaactaactcgctgaccgatagccgtgtgtaaaaaaggtggtgaaattgtcgaaaaaaagtcccggaattatttggaaataactccggaatgcccttatctttgcatccgcttcgagagagaaatactgctccggggcggaaaaaacaggttctgaaaaattttgaaaaaagttccaaaatcttttggagattcggaaaaatgacttacctttgcacccgcttcgaataagaaatacggttcgaaacgataagaaaaaaggttctgaaaatttctgaaaaaattctttcgaaaagatttggtggtttcaaaaagatgacttatctttgcaccactttccgctgaaaaatcggcggtcggaacaacggggaaggccgaaaggacagacccggcaaaaagaaagaaattgttctttatagcgatatatttgaacagcgttctttgaagtatttgagcagctaaaagttttccactctcgcgagagagtgaatttcaaacaatacctttgagatttgagctaaagatttaaaaacaaaacattttatacaatggagagtttgatcctggctcaggatgaacgctagcggcaggcctaacacatgcaagtcgaggggcatcgggattgaagcttgcttcaattgccggcgaccggcgcacgggtgcgtaacgcgtatgtaacctacctataacaggggcataacactgagaaattggtactaattccccataatattcggagaggcatctctccgggttgaaaactccggtggttatagatggacatgcgttgtattagctagttggtgaggtaacggctcaccaaggcaacgatacatagggggactgagaggttaaccccccacactggtactgagacacggaccagactcctacgggaggcagcagtgaggaatattggtcaatggacgcaagtctgaaccagccatgccgcgtgcaggaagacggctctatgagttgtaaactgcttttgtacgagggtaaactcacctacgtgtaggtgactgaaagtatcgtacgaataaggatcggctaactccgtgccagcagccgcggtaatacggaggattcaagcgttatccggatttattgggtttaaagggtgcgtaggcggtttgataagttagaggtgaaatcccggggcttaactccggaactgcctctaatactgttagactagagagtagttgcggtaggcggaatgtatggtgtagcggtgaaatgcttagagatcatacagaacaccgattgcgaaggcagcttaccaaactatatctgacgttgaggcacgaaagcgtggggagcaaacaggattagataccctggtagtccacgcagtaaacgatgataactcgttgtcggcgatacacagtcggtgactaagcgaaagcgataagttatccacctggggagtacgttcgcaagaatgaaactcaaaggaattgacgggggcccgcacaagcggaggaacatgtggtttaattcgatgatacgcgaggaaccttacccgggcttgaaagttactgacgattctggaaacaggatttcccttcggggcaggaaactaggtgctgcatggttgtcgtcagctcgtgccgtgaggtgtcgggttaagtcccataacgagcgcaacccctaccgttagttgccatcaggtcaagctgggcactctggcgggactgccggtgtaagccgagaggaaggtggggatgacgtcaaatcagcacggcccttacgtccggggctacacacgtgttacaatggtaggtacagagggtcgctaccccgcgaggggatgccaatctcgaaagcctatctcagttcggattggaggctgaaacccgcctccatgaagttggattcgctagtaatcgcgcatcagccatggcgcggtgaatacgttcccgggccttgtacacaccgcccgtcaagccatggaagctgggggtgcctgaagttcgtgaccgcaaggagcgacctagggcaaaaccggtaactggggctaagtcgtaacaaggtagccgtaccggaaggtgcggctggaacacctcctttctggag

SEQ ID NO: 11 - RNA, 1529 nt, Colonithrix sana
  source 1..1529: mol_type = rRNA
tattgagagtttgatcctggctcaggacgaacgctggcggcgtgcttaacacatgcaagtcgaacgagaatctactgaaagagttttcggacaatggatgtagaggaaagtggcggacgggtgagtaacgcgtgaggaacctgccttgaagagggggacaacagttggaaacgactgctaataccgcatgatgcataggggtcgcatgatctttatgccaaagatttatcgcttcaagatggcctcgcgtctgattagctagttggcggggtaatggcccaccaaggcgacgatcagtagccggactgagaggttgaacggccacattgggactgagatacggcccagactcctacgggaggcagcagtggggaatattgggcaatgggcgcaagcctgacccagcaacgccgcgtgaaggaagaaggctttcgggttgtaaacttcttttaagagggaagagcagaagacggtacctctagaataagccacggctaactacgtgccagcagccgcggtaatacgtaggtggcaagcgttgtccggatttactgggtgtaaagggcgtgcagccgggtctgcaagtcagatgtgaaatccatgggctcaacccatgaactgcatttgaaactgtagatcttgagtgtcggaggggcaatcggaattcctagtgtagcggtgaaatgcgtagatattaggaggaacaccagtggcgaaggcggattgctggacgataactgacggtgaggcgcgaaagtgtggggagcaaacaggattagataccctggtagtccacactgtaaacgatgaatactaggtgtgcggggactgaccccctgcgtgccgcagtaaacacaataagtattccacctggggagtacgatcgcaaggttgaaactcaaaggaattgacgggggcccgcacaagcggtggattatgtggtttaattcgaagcaacgcgaagaaccttaccagggtttgacatcctgctaacgaagtagagatacattaggtgcccttcggggaaagcagagacaggtggtgcatggttgtcgtcagctcgtgtcgtgagatgttgggttaagtcccgcaacgagcgcaacccctattgttagttgctacgcaagagcactctagcgagactgccgttgacaaaacggaggaaggtggggacgacgtcaaatcatcatgccccttatatcctgggctacacacgtaatacaatggcggtcaacagagggaagcaaagccgcgaggcagagcaaacccccaaaagccgtcccagttcggattgtaggctgcaactcgcctgcatgaagtcggaatcgctagtaatcgcggatcagcatgccgcggtgaatacgttcccgggccttgtacacaccgcccgtcacaccatgagagtcgggaacacccgaagtccgtagcctaaccagcaatggagggcgcggccgaaggtgggttcgataattggggtgaagtcgtaacaaggtagccgttcgagaacgagcggctggatcacctccttt

SEQ ID NO: 12 - RNA, 1528 nt, Colonithrix sana
  source 1..1528: mol_type = rRNA
tattgagagtttgatcctggctcaggacgaacgctggcggcgtgcttaacacatgcaagtcgaacgagaatctactgaaagagttttcggacaatggaagtagaggaaagtggcggacgggtgagtaacgcgtgaggaacctgccttgaagagggggacaacagttggaaacgactgctaataccgcatgatgcataggggtcgcatgattcttatgccaaagatttatcgcttcaagatggcctcgcgtctgattagctggttggcggggtaacggcccaccaaggcgacgatcagtagccggactgagaggttgaacggccacattgggactgagatacggcccagactcctacgggaggcagcagtggggaatattgggcaatgggcgcaagcctgacccagcaacgccgcgtgaaggaagaaggctttcgggttgtaaacttcttttaagagggaagagcagaagacggtacctctagaataagccacggctaactacgtgccagcagccgcggtaatacgtaggtggcaagcgttgtccggatttactgggtgtaaagggcgtgcagccgggtctgcaagtcagatgtgaaatccatgggctcaacccatgaactgcatttgaaactgtagatcttgagtgtcggaggggcaatcggaattcctagtgtagcggtgaaatgcgtagatattaggaggaacaccagtggcgaaggcggattgctggacgataactgacggtgaggcgcgaaagtgtggggagcaaacaggattagataccctggtagtccacactgtaaacgatgaatactaggtgtgcggggactgacccctgcgtgccgcagtaaacacaataagtattccacctggggagtacgatcgcaaggttgaaactcaaaggaattgacgggggcccgcacaagcggtggattatgtggtttaattcgaagcaacgcgaagaaccttaccagggtttgacatcctgctaacgaagtagagatacattaggtgcccttcggggaaagcagagacaggtggtgcatggttgtcgtcagctcgtgtcgtgagatgttgggttaagtcccgcaacgagcgcaacccctattgttagttgctacgcaagagcactctagcgagactgccgttgacaaaacggaggaaggtggggacgacgtcaaatcatcatgccccttatatcctgggctacacacgtaatacaatggcggtcaacagagggaagcaaagccgcgaggcagagcaaacccccaaaagccgtcccagttcggattgtaggctgcaactcgcctgcatgaagtcggaatcgctagtaatcgcggatcagcatgccgcggtgaatacgttcccgggccttgtacacaccgcccgtcacaccatgagagtcgggaacacccgaagtccgtagcctaacctgaaaaggggggcgcggccgaaggtgggttcgataattggggtgaagtcgtaacaaggtagccgttcgagaacgagcggctggatcacctccttt

SEQ ID NO: 13 - RNA, 1528 nt, Colonithrix sana
  source 1..1528: mol_type = rRNA
tattgagagtttgatcctggctcaggacgaacgctggcggcgtgcttaacacatgcaagtcggacgagaatctactgaaagagttttcggacaatggatgtagaggaaagtggcggacgggtgagtaacgcgtgaggaacctgccttgaagagggggacaacagttggaaacgactgctaataccgcatgacgcatagaggtcgcatgatctttatgccaaagatttatcgcttcaagatggcctcgcgtctgattagctggttggcggggtaacggcccaccaaggcgacgatcagtagccggactgagaggttgaacggccacattgggactgagatacggcccagactcctacgggaggcagcagtggggaatattgggcaatgggcgcaagcctgacccagcaacgccgcgtgaaggaagaaggctttcgggttgtaaacttcttttaagagggaagagcagaagacggtacctctagaataagccacggctaactacgtgccagcagccgcggtaatacgtaggtggcaagcgttgtccggatttactgggtgtaaagggcgtgcagccgggtctgcaagtcagatgtgaaatccatgggctcaacccatgaactgcatttgaaactgtagatcttgagtgtcggaggggcaatcggaattcctagtgtagcggtgaaatgcgtagatattaggaggaacaccagtggcgaaggcggattgctggacgataactgacggtgaggcgcgaaagtgtggggagcaaacaggattagataccctggtagtccacactgtaaacgatgaatactaggtgtgcggggactgacccctgcgtgccgcagtaaacacaataagtattccacctggggagtacgatcgcaaggttgaaactcaaaggaattgacgggggcccgcacaagcggtggattatgtggtttaattcgaagcaacgcgaagaaccttaccagggtttgacatcctgctaacgaagtagagatacattaggtgcccttcggggaaagcagagacaggtggtgcatggttgtcgtcagctcgtgtcgtgagatgttgggttaagtcccgcaacgagcgcaacccctattgttagttgctacgcaagagcactctagcgagactgccgttgacaaaacggaggaaggtggggacgacgtcaaatcatcatgccccttatatcctgggctacacacgtaatacaatggcggtcaacagagggaagcaaagccgcgaggcagagcaaacccccaaaagccgtcccagttcggattgtaggctgcaactcgcctgcatgaagtcggaatcgctagtaatcgcggatcagcatgccgcggtgaatacgttcccgggccttgtacacaccgcccgtcacaccatgagagtcgggaacacccgaagtccgtagcctaacctgaaaaggagggcgcggccgaaggtgggttcgataattggggtgaagtcgtaacaaggtagccgttcgagaacgagcggctggatcacctccttt

SEQ ID NO: 14 - RNA, 1529 nt, Colonithrix sana
  source 1..1529: mol_type = rRNA
tattgagagtttgatcctggctcaggacgaacgctggcggcgtgcttaacacatgcaagtcggacgagaatctactgaaagagttttcggacaatggatgtagaggaaagtggcggacgggtgagtaacgcgtgaggaacctgccttgaagagggggacaacagttggaaacgactgctaataccgcatgacgcatagaggtcgcatgatctttatgccaaagatttatcgcttcaagatggcctcgcgtctgattagctggttggcggggtaacggcccaccaaggcgacgatcagtagccggactgagaggttgaacggccacattgggactgagatacggcccagactcctacgggaggcagcagtggggaatattgggcaatgggcgcaagcctgacccagcaacgccgcgtgaaggaagaaggctttcgggttgtaaacttcttttaagagggaagagcagaagacggtacctctagaataagccacggctaactacgtgccagcagccgcggtaatacgtaggtggcaagcgttgtccggatttactgggtgtaaagggcgtgcagccgggtctgcaagtcagatgtgaaatccatgggctcaacccatgaactgcatttgaaactgtagatcttgagtgtcggaggggcaatcggaattcctagtgtagcggtgaaatgcgtagatattaggaggaacaccagtggcgaaggcggattgctggacgataactgacggtgaggcgcgaaagtgtggggagcaaacaggattagataccctggtagtccacactgtaaacgatgaatactaggtgtgcggggactgaccccctgcgtgccgcagtaaacacaataagtattccacctggggagtacgatcgcaaggttgaaactcaaaggaattgacgggggcccgcacaagcggtggattatgtggtttaattcgaagcaacgcgaagaaccttaccagggtttgacatcctgctaacgaagtagagatacattaggtgcccttcggggaaagcagagacaggtggtgcatggttgtcgtcagctcgtgtcgtgagatgttgggttaagtcccgcaacgagcgcaacccctattgttagttgctacgcaagagcactctagcgagactgccgttgacaaaacggaggaaggtggggacgacgtcaaatcatcatgccccttatatcctgggctacacacgtaatacaatggcggtcaacagagggaagcaaagccgcgaggcagagcaaacccccaaaagccgtcccagttcggattgtaggctgcaactcgcctgcatgaagtcggaatcgctagtaatcgcggatcagcatgccgcggtgaatacgttcccgggccttgtacacaccgcccgtcacaccatgagagtcgggaacacccgaagtccgtagcctaacctgaaaaggggggcgcggccgaaggtgggttcgataattggggtgaagtcgtaacaaggtagccgttcgagaacgagcggctggatcacctccttt

SEQ ID NO: 15 - RNA, 1528 nt, Colonithrix sana
  source 1..1528: mol_type = rRNA
tattgagagtttgatcctggctcaggacgaacgctggcggcgtgcttaacacatgcaagtcgaacgagaatctactgaaagagttttcggacaatggatgtagaggaaagtggcggacgggtgagtaacgcgtgaggaacctgccttgaagagggggacaacagttggaaacgactgctaataccgcatgatgcataggggtcgcatgatctttatgccaaagatttatcgcttcaagatggcctcgcgtctgattagctagttggcggggtaatggcccaccaaggcgacgatcagtagccggactgagaggttgaacggccacattgggactgagatacggcccagactcctacgggaggcagcagtggggaatattgggcaatgggcgcaagcctgacccagcaacgccgcgtgaaggaagaaggctttcgggttgtaaacttcttttaagagggaagagcagaagacggtacctctagaataagccacggctaactacgtgccagcagccgcggtaatacgtaggtggcaagcgttgtccggatttactgggtgtaaagggcgtgcagccgggtctgcaagtcagatgtgaaatccatgggctcaacccatgaactgcatttgaaactgtagatcttgagtgtcggaggggcaatcggaattcctagtgtagcggtgaaatgcgtagatattaggaggaacaccagtggcgaaggcggattgctggacgataactgacggtgaggcgcgaaagtgtggggagcaaacaggattagataccctggtagtccacactgtaaacgatgaatactaggtgtgcggggactgacccctgcgtgccgcagtaaacacaataagtattccacctggggagtacgatcgcaaggttgaaactcaaaggaattgacgggggcccgcacaagcggtggattatgtggtttaattcgaagcaacgcgaagaaccttaccagggtttgacatcctgctaacgaagtagagatacattaggtgcccttcggggaaagcagagacaggtggtgcatggttgtcgtcagctcgtgtcgtgagatgttgggttaagtcccgcaacgagcgcaacccctattgttagttgctacgcaagagcactctagcgagactgccgttgacaaaacggaggaaggtggggacgacgtcaaatcatcatgccccttatatcctgggctacacacgtaatacaatggcggtcaacagagggaagcaaagccgcgaggcagagcaaacccccaaaagccgtcccagttcggattgtaggctgcaactcgcctgcatgaagtcggaatcgctagtaatcgcggatcagcatgccgcggtgaatacgttcccgggccttgtacacaccgcccgtcacaccatgagagtcgggaacacccgaagtccgtagcctaaccagcaatggagggcgcggccgaaggtgggttcgataattggggtgaagtcgtaacaaggtagccgttcgagaacgagcggctggatcacctccttt

SEQ ID NO: 16 - RNA, 1528 nt, Colonithrix sana
  source 1..1528: mol_type = mRNA
tattgagagtttgatcctggctcaggacgaacgctggcggcgtgcttaacacatgcaagtcgaacgagaatctactgaaagagttttcggacaatggatgtagaggaaagtggcggacgggtgagtaacgcgtgaggaacctgccttgaagagggggacaacagttggaaacgactgctaataccgcatgatgcatagaggtcgcatgatctttatgccaaagatttatcgcttcaagatggcctcgcgtctgattagctggttggcggggtaacggcccaccaaggcgacgatcagtagccggactgagaggttgaacggccacattgggactgagatacggcccagactcctacgggaggcagcagtggggaatattgggcaatgggcgcaagcctgacccagcaacgccgcgtgaaggaagaaggctttcgggttgtaaacttcttttaagagggaagagcagaagacggtacctctagaataagccacggctaactacgtgccagcagccgcggtaatacgtaggtggcaagcgttgtccggatttactgggtgtaaagggcgtgcagccgggtctgcaagtcagatgtgaaatccatgggctcaacccatgaactgcatttgaaactgtagatcttgagtgtcggaggggcaatcggaattcctagtgtagcggtgaaatgcgtagatattaggaggaacaccagtggcgaaggcggattgctggacgataactgacggtgaggcgcgaaagtgtggggagcaaacaggattagataccctggtagtccacactgtaaacgatgaatactaggtgtgcggggactgacccctgcgtgccgcagtaaacacaataagtattccacctggggagtacgatcgcaaggttgaaactcaaaggaattgacgggggcccgcacaagcggtggattatgtggtttaattcgaagcaacgcgaagaaccttaccagggtttgacatcctgctaacgaagtagagatacattaggtgcccttcggggaaagcagagacaggtggtgcatggttgtcgtcagctcgtgtcgtgagatgttgggttaagtcccgcaacgagcgcaacccctattgttagttgctacgcaagagcactctagcgagactgccgttgacaaaacggaggaaggtggggacgacgtcaaatcatcatgccccttatatcctgggctacacacgtaatacaatggcggtcaacagagggaagcaaagccgcgaggcagagcaaacccccaaaagccgtcccagttcggattgtaggctgcaactcgcctgcatgaagtcggaatcgctagtaatcgcggatcagcatgccgcggtgaatacgttcccgggccttgtacacaccgcccgtcacaccatgagagtcgggaacacccgaagtccgtagcctaacctgaaaaggagggcgcggccgaaggtgggttcgataattggggtgaagtcgtaacaaggtagccgttcgagaacgagcggctggatcacctccttt

SEQ ID NO: 17 - RNA, 1529 nt, Colonithrix sana
  source 1..1529: mol_type = rRNA
tattgagagtttgatcctggctcaggacgaacgctggcggcgtgcttaacacatgcaagtcgaacgagaatctactgaaagagttttcggacaatggaagtagaggaaagtggcggacgggtgagtaacgcgtgaggaacctgccttgaagagggggacaacagttggaaacgactgctaataccgcatgatgcataggggtcgcatgattcttatgccaaagatttatcgcttcaagatggcctcgcgtctgattagctggttggcggggtaacggcccaccaaggcgacgatcagtagccggactgagaggttgaacggccacattgggactgagatacggcccagactcctacgggaggcagcagtggggaatattgggcaatgggcgcaagcctgacccagcaacgccgcgtgaaggaagaaggctttcgggttgtaaacttcttttaagagggaagagcagaagacggtacctctagaataagccacggctaactacgtgccagcagccgcggtaatacgtaggtggcaagcgttgtccggatttactgggtgtaaagggcgtgcagccgggtctgcaagtcagatgtgaaatccatgggctcaacccatgaactgcatttgaaactgtagatcttgagtgtcggaggggcaatcggaattcctagtgtagcggtgaaatgcgtagatattaggaggaacaccagtggcgaaggcggattgctggacgataactgacggtgaggcgcgaaagtgtggggagcaaacaggattagataccctggtagtccacactgtaaacgatgaatactaggtgtgcggggactgaccccctgcgtgccgcagtaaacacaataagtattccacctggggagtacgatcgcaaggttgaaactcaaaggaattgacgggggcccgcacaagcggtggattatgtggtttaattcgaagcaacgcgaagaaccttaccagggtttgacatcctgctaacgaagtagagatacattaggtgcccttcggggaaagcagagacaggtggtgcatggttgtcgtcagctcgtgtcgtgagatgttgggttaagtcccgcaacgagcgcaacccctattgttagttgctacgcaagagcactctagcgagactgccgttgacaaaacggaggaaggtggggacgacgtcaaatcatcatgccccttatatcctgggctacacacgtaatacaatggcggtcaacagagggaagcaaagccgcgaggcagagcaaacccccaaaagccgtcccagttcggattgtaggctgcaactcgcctgcatgaagtcggaatcgctagtaatcgcggatcagcatgccgcggtgaatacgttcccgggccttgtacacaccgcccgtcacaccatgagagtcgggaacacccgaagtccgtagcctaacctgaaaaggggggcgcggccgaaggtgggttcgataattggggtgaagtcgtaacaaggtagccgttcgagaacgagcggctggatcacctccttt

SEQ ID NO: 18 - RNA, 1528 nt, Colonithrix sana
  source 1..1528: mol_type = rRNA
tattgagagtttgatcctggctcaggacgaacgctggcggcgtgcttaacacatgcaagtcggacgagaatctactgaaagagttttcggacaatggatgtagaggaaagtggcggacgggtgagtaacgcgtgaggaacctgccttgaagagggggacaacagttggaaacgactgctaataccgcatgacgcatagaggtcgcatgatctttatgccaaagatttatcgcttcaagatggcctcgcgtctgattagctggttggcggggtaacggcccaccaaggcgacgatcagtagccggactgagaggttgaacggccacattgggactgagatacggcccagactcctacgggaggcagcagtggggaatattgggcaatgggcgcaagcctgacccagcaacgccgcgtgaaggaagaaggctttcgggttgtaaacttcttttaagagggaagagcagaagacggtacctctagaataagccacggctaactacgtgccagcagccgcggtaatacgtaggtggcaagcgttgtccggatttactgggtgtaaagggcgtgcagccgggtctgcaagtcagatgtgaaatccatgggctcaacccatgaactgcatttgaaactgtagatcttgagtgtcggaggggcaatcggaattcctagtgtagcggtgaaatgcgtagatattaggaggaacaccagtggcgaaggcggattgctggacgataactgacggtgaggcgcgaaagtgtggggagcaaacaggattagataccctggtagtccacactgtaaacgatgaatactaggtgtgcggggactgacccctgcgtgccgcagtaaacacaataagtattccacctggggagtacgatcgcaaggttgaaactcaaaggaattgacgggggcccgcacaagcggtggattatgtggtttaattcgaagcaacgcgaagaaccttaccagggtttgacatcctgctaacgaagtagagatacattaggtgcccttcggggaaagcagagacaggtggtgcatggttgtcgtcagctcgtgtcgtgagatgttgggttaagtcccgcaacgagcgcaacccctattgttagttgctacgcaagagcactctagcgagactgccgttgacaaaacggaggaaggtggggacgacgtcaaatcatcatgccccttatatcctgggctacacacgtaatacaatggcggtcaacagagggaagcaaagccgcgaggcagagcaaacccccaaaagccgtcccagttcggattgtaggctgcaactcgcctgcatgaagtcggaatcgctagtaatcgcggatcagcatgccgcggtgaatacgttcccgggccttgtacacaccgcccgtcacaccatgagagtcgggaacacccgaagtccgtagcctaacctgcaaaggagggcgcggccgaaggtgggttcgataattggggtgaagtcgtaacaaggtagccgttcgagaacgagcggctggatcacctccttt
